(19) United States
(12) Patent Application Publication
(10) Pub. No.: US 2026/0085313 A1
(43) Pub. Date: Mar. 26, 2026

(54) COMPOUNDS AND METHODS FOR MODULATING SMN2

(71) Applicant: Ionis Pharmaceuticals, Inc., Carlsbad, CA (US)

(72) Inventors: Frank Rigo, Carlsbad, CA (US); Thazha P. Prakash, Carlsbad, CA (US); Kar Yun Karen Ling, Carlsbad, CA (US); W. Brad Wan, Fallbrook, CA (US); William John Drury, III, Oceanside, CA (US)

(21) Appl. No.: 19/197,566

(22) Filed: May 2, 2025

Related U.S. Application Data
(63) Continuation of application No. 17/187,018, filed on Feb. 26, 2021, now abandoned.
(60) Provisional application No. 62/983,545, filed on Feb. 28, 2020.

(51) Int. Cl. C12N 15/113

(52) U.S. Cl. CPC C12N 15/113; C12N 2310/11; C12N 2310/315; C12N 2310/321; C12N 2310/322; C12N 2310/3341

(57) ABSTRACT

Provided are compounds, methods, and pharmaceutical compositions for modulating SMN2 RNA and/or protein in a cell or subject. Such compounds, methods, and pharmaceutical compositions are useful to ameliorate at least one symptom of a neurodegenerative disorder. Such symptoms include reduced muscle strength; inability or reduced ability to sit upright, to stand, and/or walk; reduced neuromuscular activity; reduced electrical activity in one or more muscles; reduced respiration; inability or reduced ability to eat, drink, and/or breathe without assistance; loss of weight or reduced weight gain; and/or decreased survival.

### SEQUENCE LISTING

[0001] The present application is being filed along with a Sequence Listing in electronic format. The Sequence Listing is provided as a file entitled 2011256-2535_SL.xml, created on Dec. 20, 2024, which is 4,013,476 bytes in size. The information in the electronic format of the sequence listing is incorporated herein by reference in its entirety.

### FIELD

[0002] Provided are compounds, methods, and pharmaceutical compositions for modulating SMN2 RNA in a cell or subject. Such compounds, methods, and pharmaceutical compositions are useful to ameliorate at least one symptom of a neurodegenerative disorder. Such symptoms include reduced muscle strength; inability or reduced ability to sit upright, to stand, and/or walk; reduced neuromuscular activity; reduced electrical activity in one or more muscles; reduced respiration; inability or reduced ability to eat, drink, and/or breathe without assistance; loss of weight or reduced weight gain; and/or decreased survival.

### BACKGROUND

[0003] Proximal spinal muscular atrophy (SMA) is a genetic neurodegenerative disorder characterized by the loss of spinal motor neurons. SMA is an autosomal recessive disease of early onset and is a leading genetic cause of death among infants. The severity of SMA varies among patients and it has thus been classified into four types. Type I SMA is the most severe form with onset at birth or within 6 months, and typically results in death within 2 years. Children with Type I SMA are unable to sit or walk. Type II SMA is the intermediate form and patients are able to sit, but cannot stand or walk. Patients with Type III SMA, a chronic form of the disease, typically develop SMA after 18 months of age (Lefebvre et al., Hum. Mol. Genet., 1998, 7, 1531-1536). Type IV SMA is a milder form and typically has an onset after 18 years of age, sometimes after 10 years of age; patients with Type IV SMA experience limited mild motor impairment, are able to walk in adulthood and generally do not have respiratory or nutritional problems (Farrar et al., Ann. Neurol., 2017, 81, 355-368; D'Amico et al., Orphanet J. of Rare Diseases, 2011, 6: 71).

[0004] The molecular basis of SMA is the loss of both copies of survival motor neuron gene 1 (SMN1), which may also be known as SMN Telomeric, and encodes a protein that is part of a multi-protein complex thought to be involved in snRNP biogenesis and recycling. A nearly identical gene, SMN2, which may also be known as SMN Centromeric, exists in a duplicated region on chromosome Sq13 and modulates disease severity. Although SMN1 and SMN2 have the potential to code for the same protein, expression of the normal SMN1 gene results solely in expression of full-length survival motor neuron (SMN) protein, while expression of the SMN2 gene results in two different protein forms, full-length SMN2 protein, and a truncated SMN2 protein, SMNA7 protein. SMN2 contains a translationally silent mutation at position +6 of exon 7, which results in inefficient inclusion of exon 7 in SMN2 transcripts. Thus, the predominant form of SMN2 is a truncated version, lacking exon 7, which is unstable and inactive (Cartegni and Krainer, Nat. Genet., 2002, 30, 377-384). Expression of the SMN2 gene results in approximately 10-20% of the full-length SMN protein and 80-90% of the unstable/non-functional SMNA7 protein. SMN protein plays a well-established role in assembly of the spliceosome and may also mediate mRNA trafficking in the axon and nerve terminus of neurons.

[0005] It is an object herein to provide compounds, methods, and pharmaceutical compositions for the treatment of SMA.

### SUMMARY OF THE INVENTION

[0006] Provided herein are compounds, methods, and pharmaceutical compositions for modulating splicing of SMN2 RNA in a cell or subject. In certain embodiments, compounds useful for modulating splicing of SMN2 RNA are oligomeric compounds. In certain embodiments, oligomeric compounds increase the amount of SMN2 RNA including exon 7. In certain embodiments, oligomeric compounds increase full-length SMN2 protein expression. In certain embodiments, the oligomeric compound comprises a modified oligonucleotide. In certain embodiments, the subject has a neurodegenerative disease. In certain embodiments, the subject has Spinal Muscular Atrophy (SMA).

[0007] Also provided are methods useful for ameliorating at least one symptom of a neurodegenerative disease. In certain embodiments, the neurodegenerative disease is SMA. In certain embodiments, symptoms include reduced muscle strength; inability or reduced ability to sit upright, to stand, and/or walk; reduced neuromuscular activity; reduced electrical activity in one or more muscles; reduced respiration; inability or reduced ability to eat, drink, and/or breathe without assistance; loss of weight or reduced weight gain; and/or decreased survival. In certain embodiments, provided herein are modified oligonucleotides for treating SMA.

### DETAILED DESCRIPTION OF THE INVENTION

[0008] It is to be understood that both the foregoing general description and the following detailed description are exemplary and explanatory only and are not restrictive. Herein, the use of the singular includes the plural unless specifically stated otherwise. As used herein, the use of “or” means “and/or” unless stated otherwise. Furthermore, the use of the term “including” as well as other forms, such as “includes” and “included”, is not limiting. Also, terms such as “element” or “component” encompass both elements and components comprising one unit and elements and components that comprise more than one subunit, unless specifically stated otherwise.

The section headings used herein are for organizational purposes only and are not to be construed as limiting the subject matter described. All documents, or portions of documents, cited in this application, including, but not limited to, patents, patent applications, articles, books, and treatises, and GenBank and NCBI reference sequence records are hereby expressly incorporated-by-reference for the portions of the document discussed herein, as well as in their entirety.

### Definitions

[0009] Unless specific definitions are provided, the nomenclature used in connection with, and the procedures and techniques of, analytical chemistry, synthetic organic chemistry, and medicinal and pharmaceutical chemistry described herein are those well-known and commonly used in the art. Where permitted, all patents, applications, published applications and other publications and other data referred to throughout in the disclosure are incorporated by reference herein in their entirety.

[0010] Unless otherwise indicated, the following terms have the following meanings:

[0011] As used herein, “2′-deoxyribonucleoside” means a nucleoside comprising a 2′-H(H) deoxyribosyl sugar moiety. In certain embodiments, a 2′-deoxyribonucleoside is a 2′-β-D deoxyribonucleoside and comprises a 2′-β-D-deoxyribosyl sugar moiety, which has the β-D configuration as found in naturally occurring deoxyribonucleic acids (DNA). In certain embodiments, a 2′-deoxyribonucleoside may comprise a modified nucleobase or may comprise an RNA nucleobase (uracil).

[0012] As used herein, “2′-MOE” means a 2′-OCH₂CH₂OCH₃ group in place of the 2′—OH group of a ribosyl sugar moiety. A “2′-MOE sugar moiety” is a sugar moiety with a 2′-OCH₂CH₂OCH₃ group in place of the 2′—OH group of a ribosyl sugar moiety. Unless otherwise indicated, a 2′-MOE sugar moiety is in the β-D configuration. “MOE” means O-methoxyethyl.

[0013] As used herein, “2′-MOE nucleoside” means a nucleoside comprising a 2′-MOE sugar moiety.

[0014] As used herein, “2′-NMA” means a —O—CH₂—C(═O)—NH—CH₃ group in place of the 2′—OH group of a ribosyl sugar moiety. A “2′-NMA sugar moiety” is a sugar moiety with a 2′-O—CH₂—C(═O)—NH—CH₃ group in place of the 2′-OH group of a ribosyl sugar moiety. Unless otherwise indicated, a 2′-NMA sugar moiety is in the β-D configuration. “NMA” means O—N-methyl acetamide.

[0015] As used herein, “2′-NMA nucleoside” means a nucleoside comprising a 2′-NMA sugar moiety.

[0016] As used herein, “2′-OMe” means a 2′-OCH₃ group in place of the 2′—OH group of a ribosyl sugar moiety. A “2′-OMe sugar moiety” is a sugar moiety with a 2′-OCH₃ group in place of the 2′—OH group of a ribosyl sugar moiety.

[0017] Unless otherwise indicated, a 2′-OMe sugar moiety is in the β-D configuration. “OMe” means O-methyl.

[0018] As used herein, “2′-OMe nucleoside” means a nucleoside comprising a 2′-OMe sugar moiety.

[0019] As used herein, “2′-substituted nucleoside” means a nucleoside comprising a 2′-substituted sugar moiety. As used herein, “2′-substituted” in reference to a sugar moiety means a sugar moiety comprising at least one 2-substituent group other than H or OH.

[0020] As used herein, “5-methyl cytosine” means a cytosine modified with a methyl group attached to the 5 position.

[0021] A 5-methyl cytosine is a modified nucleobase.

[0022] As used herein, “administering” means providing a pharmaceutical agent to a subject.

[0023] As used herein, “ameliorate” in reference to a treatment means improvement in at least one symptom relative to the same symptom in the absence of the treatment. In certain embodiments, amelioration is the reduction in the severity or frequency of a symptom, or the delayed onset or slowing of progression in the severity or frequency of a symptom. In certain embodiments, the symptom is reduced muscle strength; inability or reduced ability to sit upright, to stand, and/or walk; reduced neuromuscular activity; reduced electrical activity in one or more muscles; reduced respiration; inability or reduced ability to eat, drink, and/or breathe without assistance; loss of weight or reduced weight gain; and/or decreased survival.

[0024] As used herein, “antisense activity” means any detectable and/or measurable change attributable to the hybridization of an antisense compound to its target nucleic acid.

[0025] As used herein, “antisense compound” means an oligomeric compound or oligomeric duplex capable of achieving at least one antisense activity.

[0026] As used herein, “bicyclic nucleoside” or “BNA” means a nucleoside comprising a bicyclic sugar moiety.

[0027] As used herein, “bicyclic sugar” or “bicyclic sugar moiety” means a modified sugar moiety comprising two rings, wherein the second ring is formed via a bridge connecting two of the atoms in the first ring thereby forming a bicyclic structure. In certain embodiments, the first ring of the bicyclic sugar moiety is a furanosyl moiety. In certain embodiments, the furanosyl moiety is a ribosyl moiety. In certain embodiments, the bicyclic sugar moiety does not comprise a furanosyl moiety.

[0028] As used herein, “cerebrospinal fluid” or “CSF” means the fluid filling the space around the brain and spinal cord. “Artificial cerebrospinal fluid” or “aCSF” means a prepared or manufactured fluid that has certain properties of cerebrospinal fluid.

[0029] As used herein, “cEt” means a 4′ to 2′ bridge in place of the 2′OH-group of a ribosyl sugar moiety, wherein the bridge has the formula of 4′-CH(CH₃)—O-2′, and wherein the methyl group of the bridge is in the S configuration. A “cEt sugar moiety” is a bicyclic sugar moiety with a 4′ to 2′ bridge in place of the 2′OH-group of a ribosyl sugar moiety, wherein the bridge has the formula of 4′-CH(CH₃)—O-2′, and wherein the methyl group of the bridge is in the S configuration. “cEt” means constrained ethyl.

[0030] As used herein, “cEt nucleoside” means a nucleoside comprising a cEt sugar moiety.

[0031] As used herein, “chirally enriched population” means a plurality of molecules of identical molecular formula, wherein the number or percentage of molecules within the population that contain a particular stereochemical configuration at a particular chiral center is greater than the number or percentage of molecules expected to contain the same particular stereochemical configuration at the same particular chiral center within the population if the particular chiral center were stereorandom. Chirally enriched populations of molecules having multiple chiral centers within each molecule may contain one or more stereorandom chiral centers. In certain embodiments, the molecules are modified oligonucleotides. In certain embodiments, the molecules are compounds comprising modified oligonucleotides.

[0032] As used herein, “complementary” in reference to an oligonucleotide means that at least 70% of the nucleobases of the oligonucleotide or one or more portions thereof and the nucleobases of another nucleic acid or one or more portions thereof are capable of hydrogen bonding with one another when the nucleobase sequence of the oligonucleotide and the other nucleic acid are aligned in opposing directions. Complementary nucleobases means nucleobases that are capable of forming hydrogen bonds with one another. Complementary nucleobase pairs include adenine (A) with thymine (T), adenine (A) with uracil (U), cytosine (C) with guanine (G), and 5-methyl cytosine (mC) with guanine (G). Complementary oligonucleotides and/or target nucleic acids need not have nucleobase complementarity at each nucleoside. Rather, some mismatches are tolerated. As used herein, “fully complementary” or “100% complementary” in reference to an oligonucleotide, or a portion thereof, means that the oligonucleotide, or portion thereof, is complementary to another oligonucleotide or target nucleic acid at each nucleobase of the shorter of the two oligonucleotides, or at each nucleoside if the oligonucleotides are the same length.

[0033] As used herein, “contiguous” in the context of an oligonucleotide refers to nucleosides, nucleobases, sugar moieties, or internucleoside linkages that are immediately adjacent to each other. For example, “contiguous nucleobases” means nucleobases that are immediately adjacent to each other in a sequence.

[0034] As used herein, “hybridization” means the pairing or annealing of complementary oligonucleotides and/or nucleic acids. While not limited to a particular mechanism, the most common mechanism of hybridization involves hydrogen bonding, which may be Watson-Crick, Hoogsteen or reversed Hoogsteen hydrogen bonding, between complementary nucleobases.

[0035] As used herein, “internucleoside linkage” means the covalent linkage between contiguous nucleosides in an oligonucleotide. As used herein, “modified internucleoside linkage” means any internucleoside linkage other than a phosphodiester internucleoside linkage. “Phosphorothioate internucleoside linkage” is a modified internucleoside linkage in which one of the non-bridging oxygen atoms of a phosphodiester internucleoside linkage is replaced with a sulfur atom.

[0036] As used herein, “mismatch” or “non-complementary” means a nucleobase of a first oligonucleotide that is not complementary with the corresponding nucleobase of a second oligonucleotide or target nucleic acid when the first and second oligonucleotide are aligned.

[0037] As used herein, “motif” means the pattern of unmodified and/or modified sugar moieties, nucleobases, and/or internucleoside linkages, in an oligonucleotide.

[0038] As used herein, “non-bicyclic modified sugar moiety” means a modified sugar moiety that comprises a modification, such as a substituent, that does not form a bridge between two atoms of the sugar to form a second ring.

[0039] As used herein, “nucleobase” means an unmodified nucleobase or a modified nucleobase. As used herein an “unmodified nucleobase” is adenine (A), thymine (T), cytosine (C), uracil (U), or guanine (G). As used herein, a “modified nucleobase” is a group of atoms other than unmodified A, T, C, U, or G capable of pairing with at least one unmodified nucleobase. A “5-methyl cytosine” is a modified nucleobase. A universal base is a modified nucleobase that can pair with any one of the five unmodified nucleobases. As used herein, “nucleobase sequence” means the order of contiguous nucleobases in a target nucleic acid or oligonucleotide independent of any sugar or internucleoside linkage modification.

[0040] As used herein, “nucleoside” means a compound comprising a nucleobase and a sugar moiety. The nucleobase and sugar moiety are each, independently, unmodified or modified. As used herein, “modified nucleoside” means a nucleoside comprising a modified nucleobase and/or a modified sugar moiety. “Linked nucleosides” are nucleosides that are connected in a contiguous sequence (i.e., no additional nucleosides are presented between those that are linked).

[0041] As used herein, “oligomeric compound” means an oligonucleotide and optionally one or more additional features, such as a conjugate group or terminal group. An oligomeric compound may be paired with a second oligomeric compound that is complementary to the first oligomeric compound or may be unpaired. A “singled-stranded oligomeric compound” is an unpaired oligomeric compound. The term “oligomeric duplex” means a duplex formed by two oligomeric compounds having complementary nucleobase sequences. Each oligomeric compound of an oligomeric duplex may be referred to as a “duplexed oligomeric compound.”

[0042] As used herein, “oligonucleotide” means a strand of linked nucleosides connected via internucleoside linkages, wherein each nucleoside and internucleoside linkage may be modified or unmodified. Unless otherwise indicated, oligonucleotides consist of 8-50 linked nucleosides. As used herein, “modified oligonucleotide” means an oligonucleotide, wherein at least one nucleoside or internucleoside linkage is modified. As used herein, “unmodified oligonucleotide” means an oligonucleotide that does not comprise any nucleoside modifications or internucleoside modifications.

[0043] As used herein, “pharmaceutical composition” means a mixture of substances suitable for administering to a subject. For example, a pharmaceutical composition may comprise an oligomeric compound and a sterile aqueous solution.

[0044] As used herein, “pharmaceutically acceptable carrier or diluent” means any substance suitable for use in administering to a subject. Certain such carriers enable pharmaceutical compositions to be formulated as, for example, tablets, pills, dragees, capsules, liquids, gels, syrups, slurries, suspension, and lozenges for the oral ingestion by a subject. In certain embodiments, a pharmaceutically acceptable carrier or diluent is sterile water, sterile saline, sterile buffer solution, or sterile artificial cerebrospinal fluid.

[0045] As used herein, “pharmaceutically acceptable salts” means physiologically and pharmaceutically acceptable salts of compounds. Pharmaceutically acceptable salts retain the desired biological activity of the parent compound and do not impart undesired toxicological effects thereto.

[0046] As used herein, “RNA” means an RNA transcript and includes pre-mRNA and mature mRNA unless otherwise specified.

[0047] As used herein, “stereorandom chiral center” in the context of a population of molecules of identical molecular formula means a chiral center having a random stereochemical configuration. For example, in a population of molecules comprising a stereorandom chiral center, the number of molecules having the (S) configuration of the stereorandom chiral center may be but is not necessarily the same as the number of molecules having the (R) configuration of the stereorandom chiral center. The stereochemical configuration of a chiral center is considered random when it is the result of a synthetic method that is not designed to control the stereochemical configuration. In certain embodiments, a stereorandom chiral center is a stereorandom phosphorothioate internucleoside linkage.

[0048] As used herein, “subject” means a human or non-human animal.

[0049] As used herein, “sugar moiety” means an unmodified sugar moiety or a modified sugar moiety. As used herein, “unmodified sugar moiety” means a 2′-OH(H) β-D ribosyl moiety, as found in RNA (an “unmodified RNA sugar moiety”), or a 2′-H(H) β-D deoxyribosyl moiety, as found in DNA (an “unmodified DNA sugar moiety”). Unmodified sugar moieties have one hydrogen at each of the 1′, 3′, and 4′ positions, an oxygen at the 3′ position, and two hydrogens at the 5′ position. As used herein, “modified sugar moiety” or “modified sugar” means a modified furanosyl sugar moiety or a sugar surrogate.

[0050] As used herein, “sugar surrogate” means a modified sugar moiety having other than a furanosyl moiety that can link a nucleobase to another group, such as an internucleoside linkage, conjugate group, or terminal group in an oligonucleotide. Modified nucleosides comprising sugar surrogates can be incorporated into one or more positions within an oligonucleotide and such oligonucleotides are capable of hybridizing to complementary oligomeric compounds or target nucleic acids.

[0051] As used herein, “standard in vivo assay” means the assay described in Example 2 and reasonable variations thereof.

[0052] As used herein, “symptom” means any physical feature or test result that indicates the existence or extent of a disease or disorder. In certain embodiments, a symptom is apparent to a subject or to a medical professional examining or testing the subject.

[0053] As used herein, “target nucleic acid” means a nucleic acid that an antisense compound is designed to affect.

[0054] As used herein, “target region” means a portion of a target nucleic acid to which an oligomeric compound is designed to hybridize.

[0055] As used herein, “terminal group” means a chemical group or group of atoms that is covalently linked to a terminus of an oligonucleotide.

[0056] As used herein, “therapeutically effective amount” means an amount of a pharmaceutical agent that provides a therapeutic benefit to a subject. For example, a therapeutically effective amount improves a symptom of a disease.

### CERTAIN EMBODIMENTS

[0057] The present disclosure provides the following non-limiting numbered embodiments:

[0058] Embodiment 1. An oligomeric compound comprising a modified oligonucleotide consisting of 16, 17, 18, 19, or 20 linked nucleosides and having a nucleobase sequence comprising at least 15 or at least 16 contiguous nucleobases of any of the nucleobase sequences of SEQ ID NOs: 20-50, wherein the modified oligonucleotide comprises at least one modification selected from a modified sugar moiety and a modified internucleoside linkage.

[0059] Embodiment 2. An oligomeric compound comprising a modified oligonucleotide consisting of 17, 18, 19, or 20 linked nucleosides and having a nucleobase sequence comprising at least 15, at least 16, or at least 17 contiguous nucleobases of any of the nucleobase sequences of SEQ ID NOs: 20-27, 29-30, or 32-50, wherein the modified oligonucleotide comprises at least one modification selected from a modified sugar moiety and a modified internucleoside linkage.

[0060] Embodiment 3. An oligomeric compound comprising a modified oligonucleotide consisting of 18, 19, or 20 linked nucleosides and having a nucleobase sequence comprising at least 15, at least 16, or at least 17, or at least 18 contiguous nucleobases of any of the nucleobase sequences of SEQ ID NOs: 20-27, 30, or 33-50, wherein the modified oligonucleotide comprises at least one modification selected from a modified sugar moiety and a modified internucleoside linkage.

[0061] Embodiment 4. An oligomeric compound comprising a modified oligonucleotide consisting of 19 or 20 linked nucleosides and having a nucleobase sequence comprising at least 15, at least 16, or at least 17, at least 18, or at least 19 contiguous nucleobases of any of the nucleobase sequences of SEQ ID NOs: 20, 22, 24-27, 30, 33-50, wherein the modified oligonucleotide comprises at least one modification selected from a modified sugar moiety and a modified internucleoside linkage.

[0062] Embodiment 5. An oligomeric compound comprising a modified oligonucleotide consisting of 20 linked nucleosides and having a nucleobase sequence comprising at least 15, at least 16, or at least 17, at least 18, at least 19, or at least 20 contiguous nucleobases of any of the nucleobase sequences of SEQ ID NOs: 20, 22, 25, 27, 35, 39-46, or 49, wherein the modified oligonucleotide comprises at least one modification selected from a modified sugar moiety and a modified internucleoside linkage.

[0063] Embodiment 6. The oligomeric compound of any of embodiments 1-5, wherein the modified oligonucleotide has a nucleobase sequence that is at least 80%, 85%, 87.5%, 88.2%, 89%, 89.4%, 90%, 93.7%, 94%, 94.7%, 95%, or is 100% complementary to the nucleobase sequence of SEQ ID NO: 1 when measured across the entire nucleobase sequence of the modified oligonucleotide.

[0064] Embodiment 7. The oligomeric compound of any of embodiments 1-6, wherein the modified oligonucleotide has an internucleoside linkage motif (5′ to 3′) selected from: sososssssssssssss, ssosssssssssssoss, ssosssssosssssoss, ssosssosssosssoss, soossssssssssooss, sooosssssssssooss, sooossssssssoooss, sssssssooosssssss, ssossssssssssssss, ssssossssssssssss, ssssssossssssssss, ssssssssossssssss, ssssssssssossssss, ssssssssssssossss, ssssssssssssssoss, sossssssssssssoss, sosssssssssosssss, sosssssssosssssss, sosssssosssssssss, sosssosssssssssss, ssssosssssssssoss, ssssssosssssssoss, ssssssssosssssoss, ssssssssssosssoss, ssssssssssssososs, soossssssssssssss, sssoossssssssssss, sssssoossssssssss, sssssssoossssssss, sssssssssoossssss, sssssssssssoossss, sssssssssssssooss, sssssssoooossssss, ssoooosssssssssss, ssssoooosssssssss, ssssssssoooosssss, ssssssssssoooosss, sssssssssssooooss, ssssssooooossssss, ssssssoooooosssss, soooosssssssoooss, sssssooooooosssss, ssssssssssssssoss, ssssssssssssosss, sssssssssssssooss, ssssssssssssososs, sssssssssssosssss, sssssssssssososss, ssssssssssossosss, sssssssssosssssss, sssssssssosssosss, ssssssssosssssoss, ssssssssossssosss, sssssssosssssssss, sssssssoossssssss, sssssosssssssssss, sssosssssssssssss, sosssssssssssssss, sossssssossssssss, soossssssssssssss, ossssssssssssssssso, sssssssssssssssssoo, ssssssssssssssssoss, sssssssssssssssooss, ssssssssssssssososs, sssssssssosssssssss, sssssssssossssssoss, ssssssssoosssssssss, sosssssssssssssssss, sossssssssssssssoss, sosssssssosssssssss, sososssssssssssssss, soossssssssssssssss, sssssssssssssssssss, ssssssssssssssssso, ossssssssssssssssss, ssssssssssssososso, sssssssssssssssoss, sssssssssssssososs, ssssssssosssssssss, ssssssssossssssoss, sossssssssssssssss, sosssssssssssssoss, sossssssosssssssss, sosossssssssssssss, ssssssssssooooss, ssssssssoooossss, sssssssooossssss, ssssssoooossssss, ssssssooooosssss, sssssoooooosssss, sssssooooooossss, ssssoooossssssss, ssossssssssssoss, ssosssssossssoss, ssosssosssossoss, ssossossossososs, ssososososososss, ssoooossssssssss, soosssssssssooss, sooossssssssooss, sooosssssssoooss, soooossssssoooss, sssssssssooooss, ssssssssoooosss, ssssssooossssss, ssssssoooosssss, sssssooooosssss, sssssoooooossss, ssssoooosssssss, ssssooooooossss, sssosssosssosss, ssosssssssssoss, ssossossossosss, ssossossosososs, ssososososososs, ssoooosssssssss, soossssssssooss, sooosssssssooss, sooossssssoooss, and soooosssssoooss; wherein ‘s’ represents a phosphorothioate internucleoside linkage and ‘o’ represents a phosphodiester internucleoside linkage.

[0065] Embodiment 8. The oligomeric compound of any of embodiments 1-6, wherein the modified oligonucleotide has an internucleoside linkage motif selected from: sssssssssssssssxs and ssssssssssssssssx, wherein ‘s’ represents a phosphorothioate internucleoside linkage, ‘o’ represents a phosphodiester internucleoside linkage, and “x” represents a methoxypropylphosphonate internucleoside linkage.

[0066] Embodiment 9. The oligomeric compound of any of embodiments 1-6, wherein the modified oligonucleotide has an internucleoside linkage motif selected from: zzzzzzzzzzzzzzzzz, ssssssssssszzzzzz, ssssszzzzzzssssss, zzooooooooooooozz, zzzzooooooooooozz, zzzzzzooooooooozz, zzzzzzzzooooooozz, and ssooooooooooooss, wherein ‘s’ represents a phosphorothioate internucleoside linkage, ‘o’ represents a phosphodiester internucleoside linkage, and “z” represents a mesyl phosphoramidate internucleoside linkage.

[0067] Embodiment 10. The oligomeric compound of any of embodiments 1-9, wherein the modified oligonucleotide has a sugar motif (5′ to 3′) selected from: eeeeeeeeeeeeeeeeeeee, eeeeeeeeeeeeeeeeeee, eeeeeeeeeeeeeeeeee, eeeeeeeeeeeeeeeee, eeeeeeeeeeeeeeee, nnnnnnnnnnnnnnnn, nnnnnnnnnnnnnnnnn, nnnnnnnnnnnnnnnnnn, nnnnnnnnnnnnnnnnnnn, nnnnnnnnnnnnnnnnnnnn, nennnnneneennnnnnn, nnnnnnnnnnnnenneen, nennnnneneenenneen, nnnnnnnnnnnnnnnnnne, nnnnnnnnnnnnnnnnnnd, nnnnnnnnnnnnnnnnnny, nnnnnnnnnnnnnnnnnndd, nnnnnnnnnnnnnnnnnned, nnnnnnnnnnnnnnnnnnde, nnnnnnnnnnnnnnnnnnee, eeeeeeeeeeeeeeeeeedd, eeeeeeeeeeeeeeeeeeed, eeeeeeeeeeeeeeeeeede, nnnnnnnnnnnnnnnnnnd, nnnnnnnnnnnnnnnnnne, eeeeeeeeeeeeeeeeeed, keekeekeekeekeeeek, keeekeeekeeekeeeek, keeeeekeeeeekeeeek, keeeeeeekeeeeeeeek, keeeeeeeeeeeeeeeek, eeekeekeekeekeekek, eeekeekeekeekeekee, eeeeeekeekeekeekee, eeeeeekeekeekeeeee, eeeeeekeeeeekeeeee, keekeekeekeeeeeeee, eeeeeeeekeekeekeek, keekeekeeeeeeeeeee, eeeeeeeeeeekeekeek, keekeeeeeeeeeeeeee, eeeeeeeeeeeeeekeek, keekeekeekeekeeek, keeekeeekeeekeeek, keeeekeeeeekeeeek, keeeeeeekeeeeeeek, keeeeeeeeeeeeeeek, eekeekeekeekeekek, eekeekeekeekeekee, eeeeekeekeekeekee, eeeeekeekeekeeeee, eeeeekeeeeekeeeee, keekeekeekeeeeeee, eeeeeeekeekeekeek, keekeekeeeeeeeeee, eeeeeeeeeekeekeek, keekeeeeeeeeeeeee, eeeeeeeeeeeeekeek, keekeekeekeekeek, keeekeeekeeekeek, keeeekeeeekeeeek, keeeeeeekeeeeeek, keeeeeeeeeeeeeek, kekeekeekeekeeke, eekeekeekeekeeke, eeeeekeekeekeeke, eeeeekeekeekeeee, eeeeekeeeeekeeee, keekeekeekeeeeee, eeeeeekeekeekeek, keekeekeeeeeeeee, eeeeeeeeekeekeek, keekeeeeeeeeeeee, eeeeeeeeeeeekeek, eeeeeeeeeeeeeeeeeed, eeeeeeeeeeeeeeeeeey, ennnnnnnnnnnnnnnnnn, and ennnnnnnnnnnnnnnnnne; wherein ‘e’ represents a 2′-MOE sugar moiety, ‘n’ represents a 2′-NMA sugar moiety, ‘k’ represents a cEt sugar moiety, ‘d’ represents a 2′-β-D-deoxyribosyl sugar moiety, and ‘y’ represents a 2′-OMe sugar moiety.

[0068] Embodiment 11. The oligomeric compound of any of embodiments 1-9, wherein the modified oligonucleotide has a sugar motif (5′ to 3′) selected from nnnnnnnnnnnnnnnenn and nnnnnnnnnnnnnnnnen, wherein ‘e’ represents a 2′-MOE sugar moiety and ‘n’ represents a 2′-NMA sugar moiety.

[0069] Embodiment 12. The oligomeric compound of any of embodiments 1-9, wherein the modified oligonucleotide has a sugar motif (5′ to 3′) of qqnqqqqqnqnnqnqqnn, wherein in each ‘n’ represents a 2′-NMA sugar moiety, and each ‘q’ is independently selected from a 2′-O—(N,N-dimethyl) acetamide sugar moiety, a 2′-O—(N-ethyl) acetamide sugar moiety, a 2′-O—(N-propyl) acetamide sugar moiety, a 2′O—(N-cyclopropyl) acetamide sugar moiety, and a 2′-O—(N-cyclopropylmethyl) acetamide sugar moiety.

[0070] Embodiment 13. The oligomeric compound of any of embodiments 1-9, wherein the modified oligonucleotide comprises at least one modified sugar moiety.

[0071] Embodiment 14. The oligomeric compound of embodiment 13, wherein the modified oligonucleotide comprises at least one bicyclic sugar moiety.

[0072] Embodiment 15. The oligomeric compound of embodiment 14, wherein the bicyclic sugar moiety has a 4′-2′ bridge, wherein the 4′-2′ bridge is selected from —CH₂—O—; and —CH(CH₃)—O—.

[0073] Embodiment 16. The oligomeric compound of embodiment 13, wherein the modified oligonucleotide comprises at least one non-bicyclic modified sugar moiety.

[0074] Embodiment 17. The oligomeric compound of embodiment 16, wherein the non-bicyclic modified sugar moiety is any of a 2′-MOE sugar moiety, a 2′-NMA sugar moiety, a 2′-OMe sugar moiety, or a 2′-F sugar moiety.

[0075] Embodiment 18. The oligomeric compound of embodiment 13, wherein the modified oligonucleotide comprises at least one sugar surrogate.

[0076] Embodiment 19. The oligomeric compound of embodiment 18, wherein the sugar surrogate is any of morpholino, modified morpholino, PNA, THP, and F-HNA.

[0077] Embodiment 20. The oligomeric compound of any of embodiments 1-6 and 10-19, wherein the modified oligonucleotide comprises at least one modified internucleoside linkage.

[0078] Embodiment 21. The oligomeric compound of embodiment 20, wherein each internucleoside linkage of the modified oligonucleotide is a modified internucleoside linkage.

[0079] Embodiment 22. The oligomeric compound of embodiment 20 or embodiment 21, wherein the modified internucleoside linkage is a phosphorothioate internucleoside linkage.

[0080] Embodiment 23. The oligomeric compound of any of embodiments 1-20 or 22, wherein the modified oligonucleotide comprises at least one phosphodiester internucleoside linkage.

[0081] Embodiment 24. The oligomeric compound of any of embodiments 20, 22, or 23, wherein each internucleoside linkage is independently selected from a phosphodiester internucleoside linkage and a phosphorothioate internucleoside linkage.

[0082] Embodiment 25. The oligomeric compound of any of embodiments 13-19, wherein the modified oligonucleotide has an internucleoside linkage motif (5′ to 3′) selected from: sososssssssssssss, soossssssssssssss, sosssosssssssssss, sosssssosssssssss, sosssssssosssssss, sssoossssssssssss, sssssssoossssssss, sssssssssoossssss, and sssssssssssoossss; wherein ‘s’ represents a phosphorothioate internucleoside linkage and ‘o’ represents a phosphodiester internucleoside linkage.

[0083] Embodiment 26. The oligomeric compound of any of embodiments 1-25, wherein the modified oligonucleotide comprises a modified nucleobase.

[0084] Embodiment 27. The oligomeric compound of embodiment 26, wherein the modified nucleobase is a 5-methyl cytosine.

[0085] Embodiment 28. The oligomeric compound of any of embodiments 1-27, wherein the modified oligonucleotide consists of 16, 17, 18, 19, or 20 linked nucleosides.

[0086] Embodiment 29. The oligomeric compound of any of embodiments 1-28, wherein the modified oligonucleotide comprises 1 or 2 non-complementary nucleobases.

[0087] Embodiment 30. The oligomeric compound of any of embodiments 1-29, wherein the modified oligonucleotide comprises 1 or 2 cleavable moieties.

[0088] Embodiment 31. The oligomeric compound of embodiment 30, wherein the cleavable moiety is a phophodiester internucleoside linkage.

[0089] Embodiment 32. The oligomeric compound of any of embodiments 1-31, consisting of the modified oligonucleotide.

[0090] Embodiment 33. The oligomeric compound of any of embodiments 1-32, wherein the oligomeric compound is a singled-stranded oligomeric compound.

[0091] Embodiment 34. An oligomeric compound comprising a modified oligonucleotide according to the following chemical notation: ^{m}Cₑₛ Aₑₒ ^{m}Cₑₛ Tₑₒ Tₑₛ Tₑₛ ^{m}Cₑₛ Aₑₛ Tₑₛ Aₑₛ Aₑₛ Tₑₛ Gₑₛ^{m}Cₑₛ Tₑₛ Gₑₛ Gₑₛ ^{m}Cₑ (SEQ ID NO: 21), wherein:
[0092] A=an adenine nucleobase,
[0093] ^{m}C=a 5-methyl cytosine nucleobase,
[0094] G=a guanine nucleobase,
[0095] T=a thymine nucleobase,
[0096] e=a 2′-MOE sugar moiety,
[0097] s=a phosphorothioate internucleoside linkage, and
[0098] o=a phosphodiester internucleoside linkage.

[0099] Embodiment 35. An oligomeric compound comprising a modified oligonucleotide according to the following chemical notation: Tₑₒ Tₑₛ ^{m}Cₑₛ Aₑₛ ^{m}Cₑₛ Tₑₛ Tₑₛ Tₑₛ ^{m}Cₑₛ Aₑₛ Tₑₛ Aₑₛ Aₑₛ Tₑₛ Gₑₛ ^{m}Cₑₛ Tₑₛ Gₑₛ Gₑₒ ^{m}Cₑ (SEQ ID NO: 22), wherein:
[0100] A=an adenine nucleobase,
[0101] ^{m}C=a 5-methyl cytosine nucleobase,
[0102] G=a guanine nucleobase,
[0103] T=a thymine nucleobase,
[0104] e=a 2′-MOE sugar moiety,
[0105] s=a phosphorothioate internucleoside linkage, and
[0106] o=a phosphodiester internucleoside linkage.

[0107] Embodiment 36. An oligomeric compound comprising a modified oligonucleotide according to the following chemical notation: Tₑₒ Tₙₛ ^{m}Cₙₛ Aₙₛ ^{m}Cₙₛ Tₙₛ Tₙₛ Tₙₛ ^{m}Cₙₛ Aₙₛ Tₙₛ Gₙₛ ^{m}Cₙₛ Tₙₛ Gₙₛ Gₙₒ ^{m}Cₑ (SEQ ID NO: 51), wherein:
[0108] A=an adenine nucleobase,
[0109] ^{m}C=a 5-methyl cytosine nucleobase,
[0110] G=a guanine nucleobase,
[0111] T=a thymine nucleobase,
[0112] e=a 2′-MOE sugar moiety,
[0113] n=a 2′-NMA sugar moiety,
[0114] s=a phosphorothioate internucleoside linkage, and
[0115] o=a phosphodiester internucleoside linkage.

[0116] Embodiment 37. An oligomeric compound comprising a modified oligonucleotide according to the following chemical notation: ^{m}Cₙₛ Aₙₒ ^{m}Cₙₛ Tₙₒ Tₙₛ Tₙₛ ^{m}Cₙₛ Aₙₛ Tₙₛ Aₙₛ Aₙₛ Tₙₛ Gₙₛ ^{m}Cₙₛ Tₙₛ Gₙₛ Gₙₛ ^{m}Cₙ (SEQ ID NO: 52), wherein:
[0117] A=an adenine nucleobase,
[0118] ^{m}C=a 5-methyl cytosine nucleobase,
[0119] G=a guanine nucleobase,
[0120] T=a thymine nucleobase,
[0121] n=a 2′-NMA sugar moiety,
[0122] s=a phosphorothioate internucleoside linkage, and
[0123] o=a phosphodiester internucleoside linkage.

[0124] Embodiment 38. A modified oligonucleotide according to the following chemical structure:

[chemical structure]

or a salt thereof.

[0125] Embodiment 39. The modified oligonucleotide of embodiment 38, which is the sodium salt or the potassium salt.

[0126] Embodiment 40. A modified oligonucleotide according to the following chemical structure:

[chemical structure]

[0127] Embodiment 41. A modified oligonucleotide according to the following chemical structure:

[chemical structure]

or a salt thereof.

[0128] Embodiment 42. The modified oligonucleotide of embodiment 41, which is the sodium salt or the potassium salt.

[0129] Embodiment 43. A modified oligonucleotide according to the following chemical structure:

[chemical structure]

[0130] Embodiment 44. A modified oligonucleotide according to the following chemical structure:

[chemical structure]

or a salt thereof.

[0131] Embodiment 45. The modified oligonucleotide of embodiment 44, which is the sodium salt or the potassium salt.

[0132] Embodiment 46. A modified oligonucleotide corresponding to the following chemical structure:

[chemical structure]

[0133] Embodiment 47. A modified oligonucleotide according to the following chemical structure:

[chemical structure]

or a salt thereof.

[0134] Embodiment 48. The modified oligonucleotide of embodiment 47, which is the sodium salt or the potassium salt.

[0135] Embodiment 49. A modified oligonucleotide according to the following chemical structure:

[chemical structure]

[0136] Embodiment 50. A pharmaceutical composition comprising the oligomeric compound of any of embodiments 1-36 or the modified oligonucleotide of any of embodiments 38-49, and a pharmaceutically acceptable diluent or carrier.

[0137] Embodiment 51. The pharmaceutical composition of embodiment 50, comprising a pharmaceutically acceptable diluent and wherein the pharmaceutically acceptable diluent is artificial CSF (aCSF) or PBS.

[0138] Embodiment 52. The pharmaceutical composition of embodiment 51, wherein the pharmaceutical composition consists essentially of the modified oligonucleotide and artificial CSF (aCSF).

[0139] Embodiment 53. The pharmaceutical composition of embodiment 51, wherein the pharmaceutical composition consists essentially of the modified oligonucleotide and PBS.

[0140] Embodiment 54. A chirally enriched population of modified oligonucleotides of any of embodiments 38-49, wherein the population is enriched for modified oligonucleotides comprising at least one particular phosphorothioate internucleoside linkage having a particular stereochemical configuration.

[0141] Embodiment 55. The chirally enriched population of embodiment 54, wherein the population is enriched for modified oligonucleotides comprising at least one particular phosphorothioate internucleoside linkage having the (Sp) configuration.

[0142] Embodiment 56. The chirally enriched population of embodiment 54, wherein the population is enriched for modified oligonucleotides comprising at least one particular phosphorothioate internucleoside linkage having the (Rp) configuration.

[0143] Embodiment 57. The chirally enriched population of embodiment 54, wherein the population is enriched for modified oligonucleotides having a particular, independently selected stereochemical configuration at each phosphorothioate internucleoside linkage.

[0144] Embodiment 58. The chirally enriched population of embodiment 57, wherein the population is enriched for modified oligonucleotides having the (Sp) configuration at each phosphorothioate internucleoside linkage or for modified oligonucleotides having the (Rp) configuration at each phosphorothioate internucleoside linkage.

[0145] Embodiment 59. The chirally enriched population of embodiment 57, wherein the population is enriched for modified oligonucleotides having the (Rp) configuration at one particular phosphorothioate internucleoside linkage and the (Sp) configuration at each of the remaining phosphorothioate internucleoside linkages.

[0146] Embodiment 60. The chirally enriched population of embodiment 57, wherein the population is enriched for modified oligonucleotides having at least 3 contiguous phosphorothioate internucleoside linkages in the Sp, Sp, and Rp configurations, in the 5′ to 3′ direction.

[0147] Embodiment 61. A population of modified oligonucleotides of any of embodiments 38-49, wherein all of the phosphorothioate internucleoside linkages of the modified oligonucleotide are stereorandom.

[0148] Embodiment 62. A method of treating a disease associated with SMN1 or SMN2 comprising administering to a subject having or at risk for developing a disease associated with SMN1 or SMN2 a therapeutically effective amount of a pharmaceutical composition according to any of embodiments 50-53; and thereby treating the disease associated with SMN1 or SMN2.

[0149] Embodiment 63. The method of embodiment 62, wherein the disease associated with SMN1 or SMN2 is a neurodegenerative disease.

[0150] Embodiment 64. The method of embodiment 63, wherein the neurodegenerative disease is Spinal Muscular Atrophy (SMA).

[0151] Embodiment 65. The method of embodiment 64, wherein the SMA is any of Type I SMA, Type II SMA, Type III SMA, or Type IV SMA.

[0152] Embodiment 66. The method of embodiment 64 or embodiment 65, wherein at least one symptom of SMA is ameliorated.

[0153] Embodiment 67. The method of embodiment 66, wherein the symptom is any of reduced muscle strength; inability or reduced ability to sit upright, to stand, and/or walk; reduced neuromuscular activity; reduced electrical activity in one or more muscles; reduced respiration; inability or reduced ability to eat, drink, and/or breathe without assistance; loss of weight or reduced weight gain; and/or decreased survival.

[0154] Embodiment 68. The method of any of embodiments 62-67, wherein the pharmaceutical composition is administered to the central nervous system or systemically.

[0155] Embodiment 69. The method of embodiment 68, wherein the pharmaceutical composition is administered to the central nervous system and systemically.

[0156] Embodiment 70. The method of any of embodiment 62-67, wherein the pharmaceutical composition is administered any of intrathecally, systemically, subcutaneously, or intramuscularly.

[0157] Embodiment 71. A method of increasing SMN2 RNA including exon 7 comprising contacting a cell, tissue, or organ with an oligomeric compound of any of embodiments 1-37, a modified oligonucleotide of any of embodiments 38-49, or a pharmaceutical composition of any of embodiments 50-53.

### Certain Oligonucleotides

[0158] In certain embodiments, provided herein are oligomeric compounds comprising oligonucleotides, which consist of linked nucleosides. Oligonucleotides may be unmodified oligonucleotides (RNA or DNA) or may be modified oligonucleotides. Modified oligonucleotides comprise at least one modification relative to unmodified RNA or DNA. That is, modified oligonucleotides comprise at least one modified nucleoside (comprising a modified sugar moiety and/or a modified nucleobase) and/or at least one modified internucleoside linkage.

### Certain Modified Nucleosides

[0159] Modified nucleosides comprise a modified sugar moiety or a modified nucleobase or both a modified sugar moiety and a modified nucleobase.

### Certain Sugar Moieties

[0160] In certain embodiments, modified sugar moieties are non-bicyclic modified sugar moieties. In certain embodiments, modified sugar moieties are bicyclic or tricyclic sugar moieties. In certain embodiments, modified sugar moieties are sugar surrogates. Such sugar surrogates may comprise one or more substitutions corresponding to those of other types of modified sugar moieties.

In certain embodiments, modified sugar moieties are non-bicyclic modified sugar moieties comprising a furanosyl ring with one or more substituent groups none of which bridges two atoms of the furanosyl ring to form a bicyclic structure. Such non bridging substituents may be at any position of the furanosyl, including but not limited to substituents at the 2′, 4′, and/or 5′ positions. In certain embodiments one or more non-bridging substituent of non-bicyclic modified sugar moieties is branched. Examples of 2′-substituent groups suitable for non-bicyclic modified sugar moieties include but are not limited to: 2′-F, 2′-OCH₃ (“OMe” or “O-methyl”), and 2′-O(CH₂)₂OCH₃ (“MOE” or “O-methoxyethyl”), and 2′-O—N-alkyl acetamide, e.g., 2′-O—N-methyl acetamide (“NMA”), 2′-O—N-dimethyl acetamide, 2′-O—N-ethyl acetamide, or 2′-O—N-propyl acetamide. For example, see U.S. Pat. No. 6,147,200, Prakash et al., 2003, Org. Lett., 5, 403-6. A “2′-O—N-methyl acetamide nucleoside” or “2′-NMA nucleoside” is shown below:

[chemical structure]

[0161] In certain embodiments, 2′-substituent groups are selected from among: halo, allyl, amino, azido, SH, CN, OCN, CF₃, OCF₃, O—C₁-C₁₀ alkoxy, O—C₁-C₁₀ substituted alkoxy, O—C₁-C₁₀ alkyl, O—C₁-C₁₀ substituted alkyl, S-alkyl, N(Rₘ)-alkyl, O-alkenyl, S-alkenyl, N(Rₘ)-alkenyl, O-alkynyl, S-alkynyl, N(Rₘ)-alkynyl, O-alkylenyl-O-alkyl, alkynyl, alkaryl, aralkyl, O-alkaryl, O-aralkyl, O(CH₂)₂SCH₃, O(CH₂)₂ON(Rₘ)(Rₙ) or OCH₂C(═O)—N(Rₘ)(Rₙ), where each Rₘ and Rₙ is, independently, H, an amino protecting group, or substituted or unsubstituted C₁-C₁₀ alkyl, and the 2′-substituent groups described in Cook et al., U.S. Pat. No. 6,531,584; Cook et al., U.S. Pat. No. 5,859,221; and Cook et al., U.S. Pat. No. 6,005,087. Certain embodiments of these 2′-substituent groups can be further substituted with one or more substituent groups independently selected from among: hydroxyl, amino, alkoxy, carboxy, benzyl, phenyl, nitro (NO₂), thiol, thioalkoxy, thioalkyl, halogen, alkyl, aryl, alkenyl and alkynyl. Examples of 4′-substituent groups suitable for non-bicyclic modified sugar moieties include but are not limited to alkoxy (e.g., methoxy), alkyl, and those described in Manoharan et al., WO 2015/106128. Examples of 5′-substituent groups suitable for non-bicyclic modified sugar moieties include but are not limited to: 5′-methyl (R or S), 5′-vinyl, and 5′-methoxy. In certain embodiments, non-bicyclic modified sugar moieties comprise more than one non-bridging sugar substituent, for example, 2′-F-5′-methyl sugar moieties and the modified sugar moieties and modified nucleosides described in Migawa et al., WO 2008/101157 and Rajeev et al., US2013/0203836.

[0162] In certain embodiments, a 2′-substituted non-bicyclic modified nucleoside comprises a sugar moiety comprising a non-bridging 2′-substituent group selected from: F, NH₂, N₃, OCF₃, OCH₃, O(CH₂)₃NH₂, CH₂CH═CH₂, OCH₂CH═CH₂, OCH₂CH₂OCH₃, O(CH₂)₂SCH₃, O(CH₂)₂ON(Rₘ)(Rₙ), O(CH₂), ON(CH₃)₂, O(CH₂)₂O(CH₂)₂N(CH₃)₂, and N-substituted acetamide (OCH₂C(═O)—N(Rₘ)(Rₙ)), where each Rₘ and R. is, independently, H, an amino protecting group, or substituted or unsubstituted C₁-C₁₀ alkyl, e.g., for example, OCH₂C(═O)—N(H)CH₃ (“NMA”).

[0163] In certain embodiments, a 2′-substituted non-bicyclic modified nucleoside comprises a sugar moiety comprising a non-bridging 2′-substituent group selected from: F, OCF₃, OCH₃, OCH₂CH₂OCH₃, O(CH₂)₂SCH₃, O(CH₂)₂ON(CH₃)₂, O(CH₂)₂O(CH₂)₂N(CH₃)₂, and OCH₂C(═O)—N(H)CH₃ (“NMA”).

[0164] In certain embodiments, a 2′-substituted non-bicyclic modified nucleoside comprises a sugar moiety comprising a non-bridging 2′-substituent group selected from: F, OCH₃, OCH₂CH₂OCH₃, and OCH₂C(═O)—N(H)CH₃.

[0165] Certain modified sugar moieties comprise a substituent that bridges two atoms of the furanosyl ring to form a second ring, resulting in a bicyclic sugar moiety. In certain such embodiments, the bicyclic sugar moiety comprises a bridge between the 4′ and the 2′ furanose ring atoms. Examples of such 4′ to 2′ bridging sugar substituents include but are not limited to: 4′-CH₂-2′, 4′-(CH₂)₂-2′, 4′-(CH₂)₃-2′, 4′-CH₂—O-2′ (“LNA”), 4′-CH₂—S-2′, 4′-(CH₂)₂—O-2′ (“ENA”), 4′-CH(CH₃)—O-2′ (referred to as “constrained ethyl” or “cEt”), 4′-CH₂—O—CH₂-2′, 4′-CH₂—N(R)-2′, 4′-CH(CH₂OCH₃)—O-2′ (“constrained MOE” or “cMOE”) and analogs thereof (see, e.g., Seth et al., U.S. Pat. No. 7,399,845, Bhat et al., U.S. Pat. No. 7,569,686, Swayze et al., U.S. Pat. No. 7,741,457, and Swayze et al., U.S. Pat. No. 8,022,193), 4′-C(CH₃)(CH₃)—O-2′ and analogs thereof (see, e.g., Seth et al., U.S. Pat. No. 8,278,283), 4′-CH₂—N(OCH₃)-2′ and analogs thereof (see, e.g., Prakash et al., U.S. Pat. No. 8,278,425), 4′-CH₂—O—N(CH₃)-2′ (see, e.g., Allerson et al., U.S. Pat. No. 7,696,345 and Allerson et al., U.S. Pat. No. 8,124,745), 4′-CH₂—C(H)(CH₃)-2′ (see, e.g., Zhou, et al., J. Org. Chem., 2009, 74, 118-134), 4′-CH₂—C(═CH₂)-2′ and analogs thereof (see e.g., Seth et al., U.S. Pat. No. 8,278,426), 4′-C(RₐR_{b})—N(R)—O-2′, 4′-C(RₐR_{b})—O—N(R)-2′, 4′-CH₂—O—N(R)-2′, and 4′-CH₂—N(R)—O-2′, wherein each R, Rₐ, and R_{b} is, independently, H, a protecting group, or C₁-C₁₂ alkyl (see, e.g. Imanishi et al., U.S. Pat. No. 7,427,672).

[0166] In certain embodiments, such 4′ to 2′ bridges independently comprise from 1 to 4 linked groups independently selected from: —[C(Rₐ)(R_{b})]ₙ—, —[C(Rₐ)(R_{b})]ₙO—, —C(Rₐ)═C(R_{b})—, —C(Rₐ)═N—, —C(═NRₐ)—, —C(═O)—, —C(═S)—, —O—, —Si(Rₐ)₂—, —S(═O)ₓ—, and —N(Rₐ)—;
[0167] wherein:
[0168] x is 0, 1, or 2;
[0169] n is 1, 2, 3, or 4;
[0170] each Rₐ and R_{b} is, independently, H, a protecting group, hydroxyl, C₁-C₁₂ alkyl, substituted C₁-C₁₂ alkyl, C₂-C₁₂ alkenyl, substituted C₂-C₁₂ alkenyl, C₂-C₁₂ alkynyl, substituted C₂-C₁₂ alkynyl, C₅-C₂₀ aryl, substituted C₅-C₂₀ aryl, heterocycle radical, substituted heterocycle radical, heteroaryl, substituted heteroaryl, C₅-C₇ alicyclic radical, substituted C₅-C₇ alicyclic radical, halogen, OJ₁, NJ₁J₂, SJ₁, N₃, COOJ₁, acyl (C(═O)—H), substituted acyl, CN, sulfonyl (S(═O)₂-J₁), or sulfoxyl (S(═O)-J₁); and
[0171] each J₁ and J₂ is, independently, H, C₁-C₁₂ alkyl, substituted C₁-C₁₂ alkyl, C₂-C₁₂ alkenyl, substituted C₂-C₁₂ alkenyl, C₂-C₁₂ alkynyl, substituted C₂-C₁₂ alkynyl, C₅-C₂₀ aryl, substituted C₅-C₂₀ aryl, acyl (C(═O)—H), substituted acyl, a heterocycle radical, a substituted heterocycle radical, C₁-C₁₂ aminoalkyl, substituted C₁-C₁₂ aminoalkyl, or a protecting group.

[0172] Additional bicyclic sugar moieties are known in the art, see, for example: Freier et al., Nucleic Acids Research, 1997, 25(22), 4429-4443, Albaek et al., J. Org. Chem., 2006, 71, 7731-7740, Singh et al., Chem. Commun., 1998, 4, 455-456; Koshkin et al., Tetrahedron, 1998, 54, 3607-3630; Kumar et al., Bioorg. Med. Chem. Lett., 1998, 8, 2219-2222; Singh et al., J. Org. Chem., 1998, 63, 10035-10039; Srivastava et al., J. Am. Chem. Soc., 2007, 129, 8362-8379; Wengel et a., U.S. Pat. No. 7,053,207; Imanishi et al., U.S. Pat. No. 6,268,490; Imanishi et al. U.S. Pat. No. 6,770,748; Imanishi et al., U.S. RE44,779; Wengel et al., U.S. Pat. No. 6,794,499; Wengel et al., U.S. Pat. No. 6,670,461; Wengel et al., U.S. Pat. No. 7,034,133; Wengel et al., U.S. Pat. No. 8,080,644; Wengel et al., U.S. Pat. No. 8,034,909; Wengel et al., U.S. Pat. No. 8,153,365; Wengel et al., U.S. Pat. No. 7,572,582; and Ramasamy et al., U.S. Pat. No. 6,525,191; Torsten et al., WO 2004/106356; Wengel et al., WO 1999/014226; Seth et al., WO 2007/134181; Seth et al., U.S. Pat. No. 7,547,684; Seth et al., U.S. Pat. No. 7,666,854; Seth et al., U.S. Pat. No. 8,088,746; Seth et al., U.S. Pat. No. 7,750,131; Seth et al., U.S. Pat. No. 8,030,467; Seth et al., U.S. Pat. No. 8,268,980; Seth et al., U.S. Pat. No. 8,546,556; Seth et al., U.S. Pat. No. 8,530,640; Migawa et al., U.S. Pat. No. 9,012,421; Seth et al., U.S. Pat. No. 8,501,805; and U.S. Patent Publication Nos. Allerson et al., US2008/0039618 and Migawa et al., US2015/0191727.

[0173] In certain embodiments, bicyclic sugar moieties and nucleosides incorporating such bicyclic sugar moieties are further defined by isomeric configuration. For example, an LNA nucleoside (described herein) may be in the α-L configuration or in the β-D configuration.

[chemical structure]

α-L-methyleneoxy (4′-CH₂—O-2′) or α-L-LNA bicyclic nucleosides have been incorporated into oligonucleotides that showed antisense activity (Frieden et al., Nucleic Acids Research, 2003, 21, 6365-6372). Herein, general descriptions of bicyclic nucleosides include both isomeric configurations. When the positions of specific bicyclic nucleosides (e.g., LNA or cEt) are identified in exemplified embodiments herein, they are in the j-D configuration, unless otherwise specified.

[0174] In certain embodiments, modified sugar moieties comprise one or more non-bridging sugar substituent and one or more bridging sugar substituent (e.g., 5′-substituted and 4′-2′ bridged sugars).

[0175] In certain embodiments, modified sugar moieties are sugar surrogates. In certain such embodiments, the oxygen atom of the sugar moiety is replaced, e.g., with a sulfur, carbon or nitrogen atom. In certain such embodiments, such modified sugar moieties also comprise bridging and/or non-bridging substituents as described herein. For example, certain sugar surrogates comprise a 4′-sulfur atom and a substitution at the 2-position (see, e.g., Bhat et al., U.S. Pat. No. 7,875,733 and Bhat et al., U.S. Pat. No. 7,939,677) and/or the 5′ position.

[0176] In certain embodiments, sugar surrogates comprise rings having other than 5 atoms. For example, in certain embodiments, a sugar surrogate comprises a six-membered tetrahydropyran (“THP”). Such tetrahydropyrans may be further modified or substituted. Nucleosides comprising such modified tetrahydropyrans include but are not limited to hexitol nucleic acid (“HNA”), anitol nucleic acid (“ANA”), manitol nucleic acid (“MNA”) (see, e.g., Leumann, C J. Bioorg. & Med. Chem. 2002, 10, 841-854), fluoro HNA:

[chemical structure]

(“F-HNA”, see e.g. Swayze et al., U.S. Pat. No. 8,088,904; Swayze et al., U.S. Pat. No. 8,440,803; Swayze et al., U.S. Pat. No. 8,796,437; and Swayze et al., U.S. Pat. No. 9,005,906; F-HNA can also be referred to as a F-THP or 3-fluoro tetrahydropyran), and nucleosides comprising additional modified THP compounds having the formula:

[chemical structure]

wherein, independently, for each of said modified THP nucleoside:
[0177] Bx is a nucleobase moiety;
[0178] T₃ and T₄ are each, independently, an internucleoside linking group linking the modified THP nucleoside to the remainder of an oligonucleotide or one of T₃ and T₄ is an internucleoside linking group linking the modified THP nucleoside to the remainder of an oligonucleotide and the other of T₃ and T₄ is H, a hydroxyl protecting group, a linked conjugate group, or a 5′ or 3′-terminal group;
[0179] q₁, q₂, q₃, q₄, q₅, q₆ and q₇ are each, independently, H, C₁-C₆ alkyl, substituted C₁-C₆ alkyl, C₂-C₆ alkenyl, substituted C₂-C₆ alkenyl, C₂-C₆ alkynyl, or substituted C₂-C₆ alkynyl; and
[0180] each of R₁ and R₂ is independently selected from among: hydrogen, halogen, substituted or unsubstituted alkoxy, NJ₁J₂, SJ₁, N₃, OC(═X)J₁, OC(═X)NJ₁J₂, NJ₃C(═X)NJ₁J₂, and CN, wherein X is O, S or NJ₁, and each J₁, J₂, and J₃ is, independently, H or C₁-C₆ alkyl.

[0181] In certain embodiments, modified THP nucleosides are provided wherein q₁, q₂, q₃, q₄, q₅, q₆ and q₇ are each H.

[0182] In certain embodiments, at least one of q₁, q₂, q₃, q₄, q₅, q₆ and q₇ is other than H. In certain embodiments, at least one of q₁, q₂, q₃, q₄, q₅, q₆ and q₇ is methyl. In certain embodiments, modified THP nucleosides are provided wherein one of R₁ and R₂ is F. In certain embodiments, R₁ is F and R₂ is H, in certain embodiments, R₁ is methoxy and R₂ is H, and in certain embodiments, R₁ is methoxyethoxy and R₂ is H.

[0183] In certain embodiments, sugar surrogates comprise rings having more than 5 atoms and more than one heteroatom. For example, nucleosides comprising morpholino sugar moieties and their use in oligonucleotides have been reported (see, e.g., Braasch et al., Biochemistry, 2002, 41, 4503-4510 and Summerton et al., U.S. Pat. No. 5,698,685; Summerton et al., U.S. Pat. No. 5,166,315; Summerton et al., U.S. Pat. No. 5,185,444; and Summerton et al., U.S. Pat. No. 5,034,506). As used here, the term “morpholino” means a sugar surrogate having the following structure:

[chemical structure]

In certain embodiments, morpholinos may be modified, for example by adding or altering various substituent groups from the above morpholino structure. Such sugar surrogates are referred to herein as “modified morpholinos.”

[0184] In certain embodiments, sugar surrogates comprise acyclic moieties. Examples of nucleosides and oligonucleotides comprising such acyclic sugar surrogates include but are not limited to: peptide nucleic acid (“PNA”), acyclic butyl nucleic acid (see, e.g., Kumar et al., Org. Biomol. Chem., 2013, 11, 5853-5865), and nucleosides and oligonucleotides described in Manoharan et al., WO2011/133876.

[0185] Many other bicyclic and tricyclic sugar and sugar surrogate ring systems are known in the art that can be used in modified nucleosides.

### Certain Modified Nucleobases

[0186] In certain embodiments, modified oligonucleotides comprise one or more nucleosides comprising an unmodified nucleobase. In certain embodiments, modified oligonucleotides comprise one or more nucleosides comprising a modified nucleobase. In certain embodiments, modified oligonucleotides comprise one or more nucleosides that does not comprise a nucleobase, referred to as an abasic nucleoside.

[0187] In certain embodiments, modified nucleobases are selected from: 5-substituted pyrimidines, 6-azapyrimidines, alkyl or alkynyl substituted pyrimidines, alkyl substituted purines, and N-2, N-6 and 0-6 substituted purines. In certain embodiments, modified nucleobases are selected from: 2-aminopropyladenine, 5-hydroxymethyl cytosine, xanthine, hypoxanthine, 2-aminoadenine, 6-N-methylguanine, 6-N-methyladenine, 2-propyl adenine, 2-thiouracil, 2-thiothymine and 2-thiocytosine, 5-propynyl (—CDC-CH₃) uracil, 5-propynylcytosine, 6-azouracil, 6-azocytosine, 6-azothymine, 5-ribosyluracil (pseudouracil), 4-thiouracil, 8-halo, 8-amino, 8-thiol, 8-thioalkyl, 8-hydroxyl, 8-aza and other 8-substituted purines, 5-halo, particularly 5-bromo, 5-trifluoromethyl, 5-halouracil, and 5-halocytosine, 7-methylguanine, 7-methyladenine, 2-F-adenine, 2-aminoadenine, 7-deazaguanine, 7-deazaadenine, 3-deazaguanine, 3-deazaadenine, 6-N-benzoyladenine, 2-N-isobutyrylguanine, 4-N-benzoylcytosine, 4-N-benzoyluracil, 5-methyl 4-N-benzoylcytosine, 5-methyl 4-N-benzoyluracil, universal bases, hydrophobic bases, promiscuous bases, size-expanded bases, and fluorinated bases. Further modified nucleobases include tricyclic pyrimidines, such as 1,3-diazaphenoxazine-2-one, 1,3-diazaphenothiazine-2-one and 9-(2-aminoethoxy)-1,3-diazaphenoxazine-2-one (G-clamp). Modified nucleobases may also include those in which the purine or pyrimidine base is replaced with other heterocycles, for example 7-deaza-adenine, 7-deazaguanosine, 2-aminopyridine and 2-pyridone. Further nucleobases include those disclosed in Merigan et al., U.S. Pat. No. 3,687,808, those disclosed in The Concise Encyclopedia Of Polymer Science And Engineering, Kroschwitz, J. J., Ed., John Wiley & Sons, 1990, 858-859; Englisch et al., Angewandte Chemie, International Edition, 1991, 30, 613; Sanghvi, Y. S., Chapter 15, Antisense Research and Applications, Crooke, S. T. and Lebleu, B., Eds., CRC Press, 1993, 273-288; and those disclosed in Chapters 6 and 15, Antisense Drug Technology, Crooke S. T., Ed., CRC Press, 2008, 163-166 and 442-443.

[0188] Publications that teach the preparation of certain of the above noted modified nucleobases as well as other modified nucleobases include without limitation, Manoharan et al., US2003/0158403; Manoharan et al., US2003/0175906; Dinh et al., U.S. Pat. No. 4,845,205; Spielvogel et al., U.S. Pat. No. 5,130,302; Rogers et al., U.S. Pat. No. 5,134,066; Bischofberger et al., U.S. Pat. No. 5,175,273; Urdea et al., U.S. Pat. No. 5,367,066; Benner et al., U.S. Pat. No. 5,432,272; Matteucci et al., U.S. Pat. No. 5,434,257; Gmeiner et al., U.S. Pat. No. 5,457,187; Cook et al., U.S. Pat. No. 5,459,255; Froehler et al., U.S. Pat. No. 5,484,908; Matteucci et al., U.S. Pat. No. 5,502,177; Hawkins et al., U.S. Pat. No. 5,525,711; Haralambidis et al., U.S. Pat. No. 5,552,540; Cook et al., U.S. Pat. No. 5,587,469; Froehler et al., U.S. Pat. No. 5,594,121; Switzer et al., U.S. Pat. No. 5,596,091; Cook et al., U.S. Pat. No. 5,614,617; Froehler et al., U.S. Pat. No. 5,645,985; Cook et al., U.S. Pat. No. 5,681,941; Cook et al., U.S. Pat. No. 5,811,534; Cook et al., U.S. Pat. No. 5,750,692; Cook et al., U.S. Pat. No. 5,948,903; Cook et al., U.S. Pat. No. 5,587,470; Cook et al., U.S. Pat. No. 5,457,191; Matteucci et al., U.S. Pat. No. 5,763,588; Froehler et al., U.S. Pat. No. 5,830,653; Cook et al., U.S. Pat. No. 5,808,027; Cook et al., 6,166,199; and Matteucci et al., U.S. Pat. No. 6,005,096.

### Certain Modified Internucleoside Linkages

[0189] In certain embodiments, nucleosides of modified oligonucleotides may be linked together using any internucleoside linkage. The two main classes of internucleoside linking groups are defined by the presence or absence of a phosphorus atom. Representative phosphorus-containing internucleoside linkages include but are not limited to phosphodiesters, which contain a phosphodiester bond, P(O₂)═O, (also referred to as unmodified or naturally occurring linkages); phosphotriesters; methylphosphonates; methoxypropylphosphonates (“MOP”); phosphoramidates; mesyl phosphoramidates; phosphorothioates (P(O₂)═S); and phosphorodithioates (HS—P═S). Representative non-phosphorus containing internucleoside linking groups include but are not limited to methylenemethylimino (—CH₂—N(CH₃)—O—CH₂—); thiodiester, thionocarbamate (—O—C(═O)(NH)—S—); siloxane (—O—SiH₂—O—); and N,N′-dimethylhydrazine (—CH₂—N(CH₃)—N(CH₃)—). Modified internucleoside linkages, compared to naturally occurring phosphate linkages, can be used to alter, typically increase, nuclease resistance of the oligonucleotide. In certain embodiments, internucleoside linkages having a chiral atom can be prepared as a racemic mixture, or as separate enantiomers. Methods of preparation of phosphorous-containing and non-phosphorous-containing internucleoside linkages are well known to those skilled in the art.

[0190] Representative internucleoside linkages having a chiral center include but are not limited to alkylphosphonates and phosphorothioates. Modified oligonucleotides comprising internucleoside linkages having a chiral center can be prepared as populations of modified oligonucleotides comprising stereorandom internucleoside linkages, or as populations of modified oligonucleotides comprising phosphorothioate internucleoside linkages in particular stereochemical configurations. In certain embodiments, populations of modified oligonucleotides comprise phosphorothioate internucleoside linkages wherein all of the phosphorothioate internucleoside linkages are stereorandom. Such modified oligonucleotides can be generated using synthetic methods that result in random selection of the stereochemical configuration of each phosphorothioate internucleoside linkage. Nonetheless, as is well understood by those of skill in the art, each individual phosphorothioate of each individual oligonucleotide molecule has a defined stereoconfiguration. In certain embodiments, populations of modified oligonucleotides are enriched for modified oligonucleotides comprising one or more particular phosphorothioate internucleoside linkages in a particular, independently selected stereochemical configuration. In certain embodiments, the particular configuration of the particular phosphorothioate internucleoside linkage is present in at least 65% of the molecules in the population. In certain embodiments, the particular configuration of the particular phosphorothioate internucleoside linkage is present in at least 70% of the molecules in the population. In certain embodiments, the particular configuration of the particular phosphorothioate internucleoside linkage is present in at least 80% of the molecules in the population. In certain embodiments, the particular configuration of the particular phosphorothioate internucleoside linkage is present in at least 90% of the molecules in the population. In certain embodiments, the particular configuration of the particular phosphorothioate internucleoside linkage is present in at least 99% of the molecules in the population. Such chirally enriched populations of modified oligonucleotides can be generated using synthetic methods known in the art, e.g., methods described in Oka et al., JACS, 2003, 125, 8307, Wan et al. Nuc. Acid. Res., 2014, 42, 13456, and WO 2017/015555. In certain embodiments, a population of modified oligonucleotides is enriched for modified oligonucleotides having at least one indicated phosphorothioate in the (Sp) configuration. In certain embodiments, a population of modified oligonucleotides is enriched for modified oligonucleotides having at least one phosphorothioate in the (Rp) configuration. In certain embodiments, modified oligonucleotides comprising (Rp) and/or (Sp) phosphorothioates comprise one or more of the following formulas, respectively, wherein “B” indicates a nucleobase:

[chemical structure]

Unless otherwise indicated, chiral internucleoside linkages of modified oligonucleotides described herein can be stereorandom or in a particular stereochemical configuration.

[0191] In certain embodiments, modified oligonucleotides comprise an internucleoside motif of (5′ to 3′) sooosssssssssssssss. In certain embodiments, the particular stereochemical configuration of the modified oligonucleotides is (5′ to 3′) Sp-o-o-o-Sp-Sp-Sp-Rp-Sp-Sp-Rp-Sp-Sp-Sp-Sp-Sp-Sp-Sp-Sp or Sp-o-o-o-Sp-Sp-Sp-Rp-Sp-Sp-Sp-Sp-Sp-Sp-Sp-Sp-Sp-Sp-Sp; wherein each ‘Sp’ represents a phosphorothioate internucleoside linkage in the S configuration; Rp represents a phosphorothioate internucleoside linkage in the R configuration; and ‘o’ represents a phosphodiester internucleoside linkage.

[0192] Neutral internucleoside linkages include, without limitation, phosphotriesters, methylphosphonates, MMI (3′-CH₂—N(CH₃)—O-5′), amide-3 (3′-CH₂—C(═O)—N(H)-5′), amide-4 (3′-CH₂—N(H)—C(═O)-5′), formacetal (3′-O—CH₂—O-5′), methoxypropyl, and thioformacetal (3′-S—CH₂—O-5′). Further neutral internucleoside linkages include nonionic linkages comprising siloxane (dialkylsiloxane), carboxylate ester, carboxamide, sulfide, sulfonate ester and amides (see e.g., Carbohydrate Modifications in Antisense Research; Y. S. Sanghvi and P. D. Cook, Eds., ACS Symposium Series 580; Chapters 3 and 4, 40-65). Further neutral internucleoside linkages include nonionic linkages comprising mixed N, O, S and CH₂ component parts.

[0193] In certain embodiments, a modified internucleoside linkage is any of those described in WO 2021/030778, incorporated by reference herein.

### Certain Motifs

[0194] In certain embodiments, modified oligonucleotides comprise one or more modified nucleosides comprising a modified sugar moiety. In certain embodiments, modified oligonucleotides comprise one or more modified nucleosides comprising a modified nucleobase. In certain embodiments, modified oligonucleotides comprise one or more modified internucleoside linkages. In such embodiments, the modified, unmodified, and differently modified sugar moieties, nucleobases, and/or internucleoside linkages of a modified oligonucleotide define a pattern or motif. In certain embodiments, the patterns of sugar moieties, nucleobases, and internucleoside linkages are each independent of one another. Thus, a modified oligonucleotide may be described by its sugar motif, nucleobase motif and/or internucleoside linkage motif (as used herein, nucleobase motif describes the modifications to the nucleobases independent of the sequence of nucleobases).

### Certain Sugar Motifs

[0195] In certain embodiments, oligonucleotides comprise one or more type of modified sugar and/or unmodified sugar moiety arranged along the oligonucleotide, or portion thereof, in a defined pattern or sugar motif. In certain instances, such sugar motifs include but are not limited to any of the sugar modifications discussed herein.

[0196] In certain embodiments, modified oligonucleotides have a gapmer motif, which is defined by two external regions or “wings” and a central or internal region or “gap.” The three regions of a gapmer motif (the 5′-wing, the gap, and the 3′-wing) form a contiguous sequence of nucleosides wherein at least some of the sugar moieties of the nucleosides of each of the wings differ from at least some of the sugar moieties of the nucleosides of the gap. Specifically, at least the sugar moieties of the nucleosides of each wing that are closest to the gap (the 3′-most nucleoside of the 5′-wing and the 5′-most nucleoside of the 3′-wing) differ from the sugar moiety of the neighboring gap nucleosides, thus defining the boundary between the wings and the gap (i.e., the wing/gap junction). In certain embodiments, the sugar moieties within the gap are the same as one another. In certain embodiments, the gap includes one or more nucleoside having a sugar moiety that differs from the sugar moiety of one or more other nucleosides of the gap. In certain embodiments, the sugar motifs of the two wings are the same as one another (symmetric gapmer). In certain embodiments, the sugar motif of the 5′-wing differs from the sugar motif of the 3′-wing (asymmetric gapmer).

[0197] In certain embodiments, the wings of a gapmer comprise 1-6 nucleosides. In certain embodiments, each nucleoside of each wing of a gapmer comprises a modified sugar moiety. In certain embodiments, at least one, at least two, at least three, at least four, at least five, or at least six nucleosides of each wing of a gapmer comprises a modified sugar moiety.

[0198] In certain embodiments, the gap of a gapmer comprises 7-12 nucleosides. In certain embodiments, each nucleoside of the gap of a gapmer comprises a 2′-deoxyribosyl sugar moiety. In certain embodiments, at least one nucleoside of the gap of a gapmer comprises a modified sugar moiety and each remaining nucleoside comprises a 2′-deoxyribosyl sugar moiety.

[0199] Herein, the lengths (number of nucleosides) of the three regions of a gapmer may be provided using the notation [# of nucleosides in the 5′-wing]-[# of nucleosides in the gap]-[# of nucleosides in the 3′-wing]. Thus, a 5-10-5 gapmer consists of 5 linked nucleosides in each wing and 10 linked nucleosides in the gap. Where such nomenclature is followed by a specific modification, that modification is the modification in each sugar moiety of each wing and the gap nucleosides comprise a 2′-deoxyribosyl sugar moiety. Thus, a 5-10-5 MOE gapmer consists of 5 linked 2′-MOE nucleosides in the 5′-wing, 10 linked 2′-deoxyribonucleosides in the gap, and 5 linked 2′-MOE nucleosides in the 3′-wing.

[0200] In certain embodiments, each nucleoside of a modified oligonucleotide, or portion thereof, comprises a 2′-substituted sugar moiety, a bicyclic sugar moiety, a sugar surrogate, or a 2′-deoxyribosyl sugar moiety. In certain embodiments, the 2′-substituted sugar moiety is selected from a 2′-MOE sugar moiety, a 2′-NMA sugar moiety, a 2′-OMe sugar moiety, and a 2′-F sugar moiety. In certain embodiments, the bicyclic sugar moiety is selected from a cEt sugar moiety and an LNA sugar moiety. In certain embodiments, the sugar surrogate is selected from morpholino, modified morpholino, PNA, THP, and F-HNA.

[0201] In certain embodiments, modified oligonucleotides comprise at least 12, at least 13, at least 14, at least 15, at least 16, at least 17, at least 18, at least 19, or at least 20 nucleosides comprising a modified sugar moiety. In certain embodiments, the modified sugar moiety is selected independently from a 2′-substituted sugar moiety, a bicyclic sugar moiety, or a sugar surrogate. In certain embodiments, the 2′-substituted sugar moiety is selected from a 2′-MOE sugar moiety, a 2′-NMA sugar moiety, a 2′-OMe sugar moiety, and a 2′-F sugar moiety. In certain embodiments, the bicyclic sugar moiety is selected from a cEt sugar moiety and an LNA sugar moiety. In certain embodiments, the sugar surrogate is selected from morpholino, modified morpholino, THP, and F-HNA.

[0202] In certain embodiments, each nucleoside of a modified oligonucleotide comprises a modified sugar moiety (“fully modified oligonucleotide”). In certain embodiments, each nucleoside of a fully modified oligonucleotide comprises a 2′-substituted sugar moiety, a bicyclic sugar moiety, or a sugar surrogate. In certain embodiments, the 2′-substituted sugar moiety is selected from a 2′-MOE sugar moiety, a 2′-NMA sugar moiety, a 2′-OMe sugar moiety, and a 2′-F sugar moiety. In certain embodiments, the bicyclic sugar moiety is selected from a cEt sugar moiety and an LNA sugar moiety. In certain embodiments, the sugar surrogate is selected from morpholino, modified morpholino, THP, and F-HNA. In certain embodiments, each nucleoside of a fully modified oligonucleotide comprises the same modified sugar moiety (“uniformly modified sugar motif”). In certain embodiments, the uniformly modified sugar motif is 7 to 20 nucleosides in length. In certain embodiments, each nucleoside of the uniformly modified sugar motif comprises a 2′-substituted sugar moiety, a bicyclic sugar moiety, or a sugar surrogate. In certain embodiments, the 2′-substituted sugar moiety is selected from a 2′-MOE sugar moiety, a 2′-NMA sugar moiety, a 2′-OMe sugar moiety, and a 2′-F sugar moiety. In certain embodiments, the bicyclic sugar moiety is selected from a cEt sugar moiety and an LNA sugar moiety. In certain embodiments, the sugar surrogate is selected from morpholino, modified morpholino, THP, and F-HNA. In certain embodiments, modified oligonucleotides having at least one fully modified sugar motif may also comprise at least 1, at least 2, at least 3, or at least 4 2′-deoxyribonucleosides.

### Certain Nucleobase Motifs

[0203] In certain embodiments, oligonucleotides comprise modified and/or unmodified nucleobases arranged along the oligonucleotide, or portion thereof, in a defined pattern or motif. In certain embodiments, each nucleobase is modified. In certain embodiments, none of the nucleobases are modified. In certain embodiments, each purine or each pyrimidine is modified. In certain embodiments, each adenine is modified. In certain embodiments, each guanine is modified. In certain embodiments, each thymine is modified. In certain embodiments, each uracil is modified. In certain embodiments, each cytosine is modified. In certain embodiments, some or all of the cytosine nucleobases in a modified oligonucleotide are 5-methyl cytosines. In certain embodiments, all of the cytosine nucleobases are 5-methyl cytosines and all of the other nucleobases of the modified oligonucleotide are unmodified nucleobases.

[0204] In certain embodiments, modified oligonucleotides comprise a block of modified nucleobases. In certain such embodiments, the block is at the 3′-end of the oligonucleotide. In certain embodiments the block is within 3 nucleosides of the 3′-end of the oligonucleotide. In certain embodiments, the block is at the 5′-end of the oligonucleotide. In certain embodiments the block is within 3 nucleosides of the 5′-end of the oligonucleotide.

[0205] In certain embodiments, oligonucleotides having a gapmer motif comprise a nucleoside comprising a modified nucleobase. In certain such embodiments, one nucleoside comprising a modified nucleobase is in the central gap of an oligonucleotide having a gapmer motif. In certain such embodiments, the sugar moiety of the nucleoside is a 2′-deoxyribosyl sugar moiety. In certain embodiments, the modified nucleobase is selected from: a 2-thiopyrimidine and a 5-propynepyrimidine.

### Certain Internucleoside Linkage Motifs

[0206] In certain embodiments, oligonucleotides comprise modified and/or unmodified internucleoside linkages arranged along the oligonucleotide, or portion thereof, in a defined pattern or motif. In certain embodiments, each internucleoside linking group is a phosphodiester internucleoside linkage. In certain embodiments, each internucleoside linking group of a modified oligonucleotide is a phosphorothioate internucleoside linkage. In certain embodiments, each internucleoside linkage of a modified oligonucleotide is independently selected from a phosphorothioate internucleoside linkage and phosphodiester internucleoside linkage. In certain embodiments, each phosphorothioate internucleoside linkage is independently selected from a stereorandom phosphorothioate, a (Sp) phosphorothioate, and a (Rp) phosphorothioate. In certain embodiments, the sugar motif of a modified oligonucleotide is a gapmer and the internucleoside linkages within the gap are all modified. In certain such embodiments, some or all of the internucleoside linkages in the wings are unmodified phosphodiester internucleoside linkages. In certain embodiments, the terminal internucleoside linkages are modified. In certain embodiments, the sugar motif of a modified oligonucleotide is a gapmer, and the internucleoside linkage motif comprises at least one phosphodiester internucleoside linkage in at least one wing, wherein the at least one phosphodiester internucleoside linkage is not a terminal internucleoside linkage, and the remaining internucleoside linkages are phosphorothioate internucleoside linkages. In certain such embodiments, all of the phosphorothioate internucleoside linkages are stereorandom. In certain embodiments, all of the phosphorothioate internucleoside linkages in the wings are (Sp) phosphorothioates, and the gap comprises at least one Sp, Sp, Rp motif. In certain embodiments, populations of modified oligonucleotides are enriched for modified oligonucleotides comprising such internucleoside linkage motifs. In certain embodiments, one or more internucleoside linkage is a mesyl phosphoramidate internucleoside linkage. In certain embodiments, each internucleoside linkage is independently selected from a phosphodiester internucleoside linkage, a phosphorothioate internucleoside linkage, and a mesyl phosphoramidate internucleoside linkage. In certain embodiments, each internucleoside linkage is independently selected from a phosphorothioate internucleoside linkage and a mesyl phosphoramidate internucleoside linkage. In certain embodiments, one or more internucleoside linkage is a methoxypropylphosphonate internucleoside linkage. In certain embodiments, each internucleoside linkage is independently selected from a phosphodiester internucleoside linkage, a phosphorothioate internucleoside linkage, and a methoxypropylphosphonate internucleoside linkage. In certain embodiments, each internucleoside linkage is independently selected from a phosphorothioate internucleoside linkage and a methoxypropylphosphonate internucleoside linkage.

[0207] In certain embodiments, modified oligonucleotides comprise at least 1, at least 2, at least 3, at least 4, at least 5, at least 6, at least 7, at least 8, at least 9, at least 10, at least 11, at least 12, at least 13, at least 14, at least 15, at least 16, at least 17, at least 18, or at least 19 phosphodiester internucleoside linkages. In certain embodiments, modified oligonucleotides comprise at least 1, at least 2, at least 3, at least 4, at least 5, at least 6, at least 7, at least 8, at least 9, at least 10, at least 11, at least 12, at least 13, at least 14, at least 15, at least 16, at least 17, at least 18, or at least 19 phosphorothioate internucleoside linkages. In certain embodiments, modified oligonucleotides comprise at least 1, at least 2, at least 3, at least 4, or at least 5 phosphodiester internucleoside linkages and the remainder of the internucleoside linkages are phosphorothioate internucleoside linkages.

### Certain Lengths

[0208] It is possible to increase or decrease the length of an oligonucleotide without eliminating activity. For example, in Woolf et al., Proc. Natl. Acad. Sci. USA, 1992, 89, 7305-7309, 1992), a series of oligonucleotides 13-25 nucleobases in length were tested for their ability to induce cleavage of a target nucleic acid in an oocyte injection model. Oligonucleotides 25 nucleobases in length with 8 or 11 mismatch bases near the ends of the oligonucleotides were able to direct specific cleavage of the target nucleic acid, albeit to a lesser extent than the oligonucleotides that contained no mismatches. Similarly, target specific cleavage was achieved using 13 nucleobase oligonucleotides, including those with 1 or 3 mismatches.

[0209] In certain embodiments, oligonucleotides (including modified oligonucleotides) can have any of a variety of ranges of lengths. In certain embodiments, oligonucleotides consist of X to Y linked nucleosides, where X represents the fewest number of nucleosides in the range and Y represents the largest number nucleosides in the range. In certain such embodiments, X and Y are each independently selected from 8, 9, 10, 11, 12, 13, 14, 15, 16, 17, 18, 19, 20, 21, 22, 23, 24, 25, 26, 27, 28, 29, 30, 31, 32, 33, 34, 35, 36, 37, 38, 39, 40, 41, 42, 43, 44, 45, 46, 47, 48, 49, and 50; provided that X≤Y. For example, in certain embodiments, oligonucleotides consist of 12 to 13, 12 to 14, 12 to 15, 12 to 16, 12 to 17, 12 to 18, 12 to 19, 12 to 20, 12 to 21, 12 to 22, 12 to 23, 12 to 24, 12 to 25, 12 to 26, 12 to 27, 12 to 28, 12 to 29, 12 to 30, 13 to 14, 13 to 15, 13 to 16, 13 to 17, 13 to 18, 13 to 19, 13 to 20, 13 to 21, 13 to 22, 13 to 23, 13 to 24, 13 to 25, 13 to 26, 13 to 27, 13 to 28, 13 to 29, 13 to 30, 14 to 15, 14 to 16, 14 to 17, 14 to 18, 14 to 19, 14 to 20, 14 to 21, 14 to 22, 14 to 23, 14 to 24, 14 to 25, 14 to 26, 14 to 27, 14 to 28, 14 to 29, 14 to 30, 15 to 16, 15 to 17, 15 to 18, 15 to 19, 15 to 20, 15 to 21, 15 to 22, 15 to 23, 15 to 24, 15 to 25, 15 to 26, 15 to 27, 15 to 28, 15 to 29, 15 to 30, 16 to 17, 16 to 18, 16 to 19, 16 to 20, 16 to 21, 16 to 22, 16 to 23, 16 to 24, 16 to 25, 16 to 26, 16 to 27, 16 to 28, 16 to 29, 16 to 30, 17 to 18, 17 to 19, 17 to 20, 17 to 21, 17 to 22, 17 to 23, 17 to 24, 17 to 25, 17 to 26, 17 to 27, 17 to 28, 17 to 29, 17 to 30, 18 to 19, 18 to 20, 18 to 21, 18 to 22, 18 to 23, 18 to 24, 18 to 25, 18 to 26, 18 to 27, 18 to 28, 18 to 29, 18 to 30, 19 to 20, 19 to 21, 19 to 22, 19 to 23, 19 to 24, 19 to 25, 19 to 26, 19 to 29, 19 to 28, 19 to 29, 19 to 30, 20 to 21, 20 to 22, 20 to 23, 20 to 24, 20 to 25, 20 to 26, 20 to 27, 20 to 28, 20 to 29, 20 to 30, 21 to 22, 21 to 23, 21 to 24, 21 to 25, 21 to 26, 21 to 27, 21 to 28, 21 to 29, 21 to 30, 22 to 23, 22 to 24, 22 to 25, 22 to 26, 22 to 27, 22 to 28, 22 to 29, 22 to 30, 23 to 24, 23 to 25, 23 to 26, 23 to 27, 23 to 28, 23 to 29, 23 to 30, 24 to 25, 24 to 26, 24 to 27, 24 to 28, 24 to 29, 24 to 30, 25 to 26, 25 to 27, 25 to 28, 25 to 29, 25 to 30, 26 to 27, 26 to 28, 26 to 29, 26 to 30, 27 to 28, 27 to 29, 27 to 30, 28 to 29, 28 to 30, or 29 to 30 linked nucleosides.

[0210] In certain embodiments, oligonucleotides consist of 16 linked nucleosides. In certain embodiments, oligonucleotides consist of 17 linked nucleosides. In certain embodiments, oligonucleotides consist of 18 linked nucleosides. In certain embodiments, oligonucleotides consist of 19 linked nucleosides. In certain embodiments, oligonucleotides consist of 20 linked nucleosides.

### Certain Modified Oligonucleotides

[0211] In certain embodiments, the above modifications (sugar, nucleobase, internucleoside linkage) are incorporated into a modified oligonucleotide. In certain embodiments, modified oligonucleotides are characterized by their modification motifs and overall lengths. In certain embodiments, such parameters are each independent of one another. Thus, unless otherwise indicated, each internucleoside linkage of an oligonucleotide having a gapmer sugar motif may be modified or unmodified and may or may not follow the gapmer modification pattern of the sugar modifications. For example, the internucleoside linkages within the wing regions of a sugar gapmer may be the same or different from one another and may be the same or different from the internucleoside linkages of the gap region of the sugar motif. Likewise, such sugar gapmer oligonucleotides may comprise one or more modified nucleobase independent of the gapmer pattern of the sugar modifications. Unless otherwise indicated, all modifications are independent of nucleobase sequence.

### Certain Populations of Modified Oligonucleotides

[0212] Populations of modified oligonucleotides in which all of the modified oligonucleotides of the population have the same molecular formula can be stereorandom populations or chirally enriched populations. All of the chiral centers of all of the modified oligonucleotides are stereorandom in a stereorandom population. In a chirally enriched population, at least one particular chiral center is not stereorandom in the modified oligonucleotides of the population. In certain embodiments, the modified oligonucleotides of a chirally enriched population are enriched for β-D ribosyl sugar moieties, and all of the phosphorothioate internucleoside linkages are stereorandom. In certain embodiments, the modified oligonucleotides of a chirally enriched population are enriched for both β-D ribosyl sugar moieties and at least one, particular phosphorothioate internucleoside linkage in a particular stereochemical configuration.

### Nucleobase Sequence

[0213] In certain embodiments, oligonucleotides (unmodified or modified oligonucleotides) are further described by their nucleobase sequence. In certain embodiments oligonucleotides have a nucleobase sequence that is complementary to a second oligonucleotide or an identified reference nucleic acid, such as a target nucleic acid. In certain such embodiments, a portion of an oligonucleotide has a nucleobase sequence that is complementary to a second oligonucleotide or an identified reference nucleic acid, such as a target nucleic acid. In certain embodiments, the nucleobase sequence of a portion or entire length of an oligonucleotide is at least 50%, at least 60%, at least 70%, at least 80%, at least 85%, at least 90%, at least 95%, or 100% complementary to the second oligonucleotide or nucleic acid, such as a target nucleic acid.

### Certain Oligomeric Compounds

[0214] In certain embodiments, provided herein are oligomeric compounds, which consist of an oligonucleotide (modified or unmodified) and optionally one or more conjugate groups and/or terminal groups. Conjugate groups consist of one or more conjugate moiety and a conjugate linker which links the conjugate moiety to the oligonucleotide. Conjugate groups may be attached to either or both ends of an oligonucleotide and/or at any internal position. In certain embodiments, conjugate groups are attached to the 2′-position of a nucleoside of a modified oligonucleotide. In certain embodiments, conjugate groups that are attached to either or both ends of an oligonucleotide are terminal groups. In certain such embodiments, conjugate groups or terminal groups are attached at the 3′ and/or 5′-end of oligonucleotides. In certain such embodiments, conjugate groups (or terminal groups) are attached at the 3′-end of oligonucleotides. In certain embodiments, conjugate groups are attached near the 3′-end of oligonucleotides. In certain embodiments, conjugate groups (or terminal groups) are attached at the 5′-end of oligonucleotides. In certain embodiments, conjugate groups are attached near the 5′-end of oligonucleotides.

[0215] Examples of terminal groups include but are not limited to conjugate groups, capping groups, phosphate moieties, protecting groups, abasic nucleosides, modified or unmodified nucleosides, and two or more nucleosides that are independently modified or unmodified.

### Certain Conjugate Groups

[0216] In certain embodiments, oligonucleotides are covalently attached to one or more conjugate groups. In certain embodiments, conjugate groups modify one or more properties of the attached oligonucleotide, including but not limited to pharmacodynamics, pharmacokinetics, stability, binding, absorption, tissue distribution, cellular distribution, cellular uptake, charge, and clearance. In certain embodiments, conjugate groups impart a new property on the attached oligonucleotide, e.g., fluorophores or reporter groups that enable detection of the oligonucleotide. Certain conjugate groups and conjugate moieties have been described previously, for example: cholesterol moiety (Letsinger et al., Proc. Natl. Acad. Sci. USA, 1989, 86, 6553-6556), cholic acid (Manoharan et al., Bioorg. Med. Chem. Lett., 1994, 4, 1053-1060), a thioether, e.g., hexyl-S-tritylthiol (Manoharan et al., Ann. N.Y. Acad. Sci., 1992, 660, 306-309; Manoharan et al., Bioorg. Med. Chem. Lett., 1993, 3, 2765-2770), a thiocholesterol (Oberhauser et al., Nucl. Acids Res., 1992, 20, 533-538), an aliphatic chain, e.g., do-decan-diol or undecyl residues (Saison-Behmoaras et al., EMBO J., 1991, 10, 1111-1118; Kabanov et al., FEBS Lett., 1990, 259, 327-330; Svinarchuk et al., Biochimie, 1993, 75, 49-54), a phospholipid, e.g., di-hexadecyl-rac-glycerol or triethyl-ammonium 1,2-di-O-hexadecyl-rac-glycero-3-H-phosphonate (Manoharan et al., Tetrahedron Lett., 1995, 36, 3651-3654; Shea et al., Nucl. Acids Res., 1990, 18, 3777-3783), a polyamine or a polyethylene glycol chain (Manoharan et al., Nucleosides & Nucleotides, 1995, 14, 969-973), or adamantane acetic acid a palmityl moiety (Mishra et al., Biochim. Biophys. Acta, 1995, 1264, 229-237), an octadecylamine or hexylamino-carbonyl-oxycholesterol moiety (Crooke et al., J. Pharmacol. Exp. Ther., 1996, 277, 923-937), a tocopherol group (Nishina et al., Molecular Therapy Nucleic Acids, 2015, 4, e220; and Nishina et al., Molecular Therapy, 2008, 16, 734-740), or a GalNAc cluster (e.g., WO2014/179620).

### Conjugate Moieties

[0217] Conjugate moieties include, without limitation, intercalators, reporter molecules, polyamines, polyamides, peptides, carbohydrates, vitamin moieties, polyethylene glycols, thioethers, polyethers, cholesterols, thiocholesterols, cholic acid moieties, folate, lipids, lipophilic groups, phospholipids, biotin, phenazine, phenanthridine, anthraquinone, adamantane, acridine, fluoresceins, rhodamines, coumarins, fluorophores, and dyes.

[0218] In certain embodiments, a conjugate moiety comprises an active drug substance, for example, aspirin, warfarin, phenylbutazone, ibuprofen, suprofen, fen-bufen, ketoprofen, (S)-(+)-pranoprofen, carprofen, dansylsarcosine, 2,3,5-triiodobenzoic acid, fingolimod, flufenamic acid, folinic acid, a benzothiadiazide, chlorothiazide, a diazepine, indo-methicin, a barbiturate, a cephalosporin, a sulfa drug, an antidiabetic, an antibacterial, or an antibiotic.

### Conjugate Linkers

[0219] Conjugate moieties are attached to oligonucleotides through conjugate linkers. In certain oligomeric compounds, the conjugate linker is a single chemical bond (i.e., the conjugate moiety is attached directly to an oligonucleotide through a single bond). In certain oligomeric compounds, a conjugate moiety is attached to an oligonucleotide via a more complex conjugate linker comprising one or more conjugate linker moieties, which are sub-units making up a conjugate linker. In certain embodiments, the conjugate linker comprises a chain structure, such as a hydrocarbyl chain, or an oligomer of repeating units such as ethylene glycol, nucleosides, or amino acid units.

[0220] In certain embodiments, a conjugate linker comprises one or more groups selected from alkyl, amino, oxo, amide, disulfide, polyethylene glycol, ether, thioether, and hydroxylamino. In certain such embodiments, the conjugate linker comprises groups selected from alkyl, amino, oxo, amide and ether groups. In certain embodiments, the conjugate linker comprises groups selected from alkyl and amide groups. In certain embodiments, the conjugate linker comprises groups selected from alkyl and ether groups. In certain embodiments, the conjugate linker comprises at least one phosphorus moiety. In certain embodiments, the conjugate linker comprises at least one phosphate group. In certain embodiments, the conjugate linker includes at least one neutral linking group.

[0221] In certain embodiments, conjugate linkers, including the conjugate linkers described above, are bifunctional linking moieties, e.g., those known in the art to be useful for attaching conjugate groups to parent compounds, such as the oligonucleotides provided herein. In general, a bifunctional linking moiety comprises at least two functional groups. One of the functional groups is selected to bind to a particular site on a parent compound and the other is selected to bind to a conjugate group. Examples of functional groups used in a bifunctional linking moiety include but are not limited to electrophiles for reacting with nucleophilic groups and nucleophiles for reacting with electrophilic groups. In certain embodiments, bifunctional linking moieties comprise one or more groups selected from amino, hydroxyl, carboxylic acid, thiol, alkyl, alkenyl, and alkynyl.

[0222] Examples of conjugate linkers include but are not limited to pyrrolidine, 8-amino-3,6-dioxaoctanoic acid (ADO), succinimidyl 4-(N-maleimidomethyl) cyclohexane-1-carboxylate (SMCC) and 6-aminohexanoic acid (AHEX or AHA). Other conjugate linkers include but are not limited to substituted or unsubstituted C₁-C₁₀ alkyl, substituted or unsubstituted C₂-C₁₀ alkenyl or substituted or unsubstituted C₂-C₁₀ alkynyl, wherein a nonlimiting list of preferred substituent groups includes hydroxyl, amino, alkoxy, carboxy, benzyl, phenyl, nitro, thiol, thioalkoxy, halogen, alkyl, aryl, alkenyl and alkynyl.

[0223] In certain embodiments, conjugate linkers comprise 1-10 linker-nucleosides. In certain embodiments, conjugate linkers comprise 2-5 linker-nucleosides. In certain embodiments, conjugate linkers comprise exactly 3 linker-nucleosides. In certain embodiments, conjugate linkers comprise the TCA motif. In certain embodiments, such linker-nucleosides are modified nucleosides. In certain embodiments such linker-nucleosides comprise a modified sugar moiety. In certain embodiments, linker-nucleosides are unmodified. In certain embodiments, linker-nucleosides comprise an optionally protected heterocyclic base selected from a purine, substituted purine, pyrimidine or substituted pyrimidine. In certain embodiments, a cleavable moiety is a nucleoside selected from uracil, thymine, cytosine, 4-N-benzoylcytosine, 5-methyl cytosine, 4-N-benzoyl-5-methyl cytosine, adenine, 6-N-benzoyladenine, guanine and 2-N-isobutyrylguanine. It is typically desirable for linker-nucleosides to be cleaved from the oligomeric compound after it reaches a target tissue. Accordingly, linker-nucleosides are typically linked to one another and to the remainder of the oligomeric compound through cleavable bonds. In certain embodiments, such cleavable bonds are phosphodiester bonds.

[0224] Herein, linker-nucleosides are not considered to be part of the oligonucleotide. Accordingly, in embodiments in which an oligomeric compound comprises an oligonucleotide consisting of a specified number or range of linked nucleosides and/or a specified percent complementarity to a reference nucleic acid and the oligomeric compound also comprises a conjugate group comprising a conjugate linker comprising linker-nucleosides, those linker-nucleosides are not counted toward the length of the oligonucleotide and are not used in determining the percent complementarity of the oligonucleotide for the reference nucleic acid. For example, an oligomeric compound may comprise (1) a modified oligonucleotide consisting of 8-30 nucleosides and (2) a conjugate group comprising 1-10 linker-nucleosides that are contiguous with the nucleosides of the modified oligonucleotide. The total number of contiguous linked nucleosides in such an oligomeric compound is more than 30. Alternatively, an oligomeric compound may comprise a modified oligonucleotide consisting of 8-30 nucleosides and no conjugate group. The total number of contiguous linked nucleosides in such an oligomeric compound is no more than 30. Unless otherwise indicated conjugate linkers comprise no more than 10 linker-nucleosides. In certain embodiments, conjugate linkers comprise no more than 5 linker-nucleosides. In certain embodiments, conjugate linkers comprise no more than 3 linker-nucleosides. In certain embodiments, conjugate linkers comprise no more than 2 linker-nucleosides. In certain embodiments, conjugate linkers comprise no more than 1 linker-nucleoside.

[0225] In certain embodiments, it is desirable for a conjugate group to be cleaved from the oligonucleotide. For example, in certain circumstances oligomeric compounds comprising a particular conjugate moiety are better taken up by a particular cell type, but once the oligomeric compound has been taken up, it is desirable that the conjugate group be cleaved to release the unconjugated or parent oligonucleotide. Thus, certain conjugate linkers may comprise one or more cleavable moieties. In certain embodiments, a cleavable moiety is a cleavable bond. In certain embodiments, a cleavable moiety is a group of atoms comprising at least one cleavable bond. In certain embodiments, a cleavable moiety comprises a group of atoms having one, two, three, four, or more than four cleavable bonds. In certain embodiments, a cleavable moiety is selectively cleaved inside a cell or subcellular compartment, such as a lysosome. In certain embodiments, a cleavable moiety is selectively cleaved by endogenous enzymes, such as nucleases.

[0226] In certain embodiments, a cleavable bond is selected from among: an amide, an ester, an ether, one or both esters of a phosphodiester, a phosphate ester, a carbamate, or a disulfide. In certain embodiments, a cleavable bond is one or both of the esters of a phosphodiester. In certain embodiments, a cleavable moiety comprises a phosphate or phosphodiester. In certain embodiments, the cleavable moiety is a phosphate linkage between an oligonucleotide and a conjugate moiety or conjugate group.

[0227] In certain embodiments, a cleavable moiety comprises or consists of one or more linker-nucleosides. In certain such embodiments, the one or more linker-nucleosides are linked to one another and/or to the remainder of the oligomeric compound through cleavable bonds. In certain embodiments, such cleavable bonds are unmodified phosphodiester bonds. In certain embodiments, a cleavable moiety is 2′-deoxyribonucleoside that is attached to either the 3′ or 5′-terminal nucleoside of an oligonucleotide by a phosphate internucleoside linkage and covalently attached to the remainder of the conjugate linker or conjugate moiety by a phosphate or phosphorothioate internucleoside linkage. In certain such embodiments, the cleavable moiety is 2′-deoxyadenosine.

### Certain Terminal Groups

[0228] In certain embodiments, oligomeric compounds comprise one or more terminal groups. In certain such embodiments, oligomeric compounds comprise a stabilized 5′-phosphate. Stabilized 5′-phosphates include, but are not limited to 5′-phosphanates, including, but not limited to 5′-vinylphosphonates. In certain embodiments, terminal groups comprise one or more abasic nucleosides and/or inverted nucleosides. In certain embodiments, terminal groups comprise one or more 2′-linked nucleosides. In certain such embodiments, the 2′-linked nucleoside is an abasic nucleoside.

### Oligomeric Duplexes

[0229] In certain embodiments, oligomeric compounds described herein comprise an oligonucleotide, having a nucleobase sequence complementary to that of a target nucleic acid. In certain embodiments, an oligomeric compound is paired with a second oligomeric compound to form an oligomeric duplex. Such oligomeric duplexes comprise a first oligomeric compound having a portion complementary to a target nucleic acid and a second oligomeric compound having a portion complementary to the first oligomeric compound. In certain embodiments, the first oligomeric compound of an oligomeric duplex comprises or consists of (1) a modified or unmodified oligonucleotide and optionally a conjugate group and (2) a second modified or unmodified oligonucleotide and optionally a conjugate group. Either or both oligomeric compounds of an oligomeric duplex may comprise a conjugate group. The oligonucleotides of each oligomeric compound of an oligomeric duplex may include non-complementary overhanging nucleosides.

### Antisense Activity

[0230] In certain embodiments, oligomeric compounds and oligomeric duplexes are capable of hybridizing to a target nucleic acid, resulting in at least one antisense activity; such oligomeric compounds and oligomeric duplexes are antisense compounds. In certain embodiments, antisense compounds have antisense activity when they reduce, modulate, or increase the amount or activity of a target nucleic acid by 25% or more in the standard cell assay. In certain embodiments, antisense compounds selectively affect one or more target nucleic acid. Such antisense compounds comprise a nucleobase sequence that hybridizes to one or more target nucleic acid, resulting in one or more desired antisense activity and does not hybridize to one or more non-target nucleic acid or does not hybridize to one or more non-target nucleic acid in such a way that results in significant undesired antisense activity.

[0231] In certain antisense activities, hybridization of an antisense compound to a target nucleic acid results in recruitment of a protein that cleaves the target nucleic acid. For example, certain antisense compounds result in RNase H mediated cleavage of the target nucleic acid. RNase H is a cellular endonuclease that cleaves the RNA strand of an RNA:DNA duplex. The DNA in such an RNA:DNA duplex need not be unmodified DNA. In certain embodiments, provided herein are antisense compounds that are sufficiently “DNA-like” to elicit RNase H activity. In certain embodiments, one or more non-DNA-like nucleoside in the gap of a gapmer is tolerated.

[0232] In certain antisense activities, an antisense compound or a portion of an antisense compound is loaded into an RNA-induced silencing complex (RISC), ultimately resulting in cleavage of the target nucleic acid. For example, certain antisense compounds result in cleavage of the target nucleic acid by Argonaute. Antisense compounds that are loaded into RISC are RNAi compounds. RNAi compounds may be double-stranded (siRNA) or single-stranded (ssRNA).

[0233] In certain embodiments, hybridization of an antisense compound to a target nucleic acid does not result in recruitment of a protein that cleaves that target nucleic acid. In certain embodiments, hybridization of the antisense compound to the target nucleic acid results in alteration of splicing of the target nucleic acid. In certain embodiments, hybridization of an antisense compound to a target nucleic acid results in inhibition of a binding interaction between the target nucleic acid and a protein or other nucleic acid. In certain embodiments, hybridization of an antisense compound to a target nucleic acid results in alteration of translation of the target nucleic acid. In certain embodiments, hybridization of an antisense compound to a target nucleic acid results in exon inclusion. In certain embodiments, hybridization of an antisense compound to a target nucleic acid results in an increase in the amount or activity of a target nucleic acid. In certain embodiments, hybridization of an antisense compound complementary to a target nucleic acid results in alteration of splicing, leading to the inclusion of an exon in the mRNA.

[0234] Antisense activities may be observed directly or indirectly. In certain embodiments, observation or detection of an antisense activity involves observation or detection of a change in an amount of a target nucleic acid or protein encoded by such target nucleic acid, a change in the ratio of splice variants of a nucleic acid or protein and/or a phenotypic change in a cell or subject.

### Certain Target Nucleic Acids

[0235] In certain embodiments, oligomeric compounds comprise or consist of an oligonucleotide comprising a portion that is complementary to a target nucleic acid. In certain embodiments, the target nucleic acid is an endogenous RNA molecule. In certain embodiments, the target nucleic acid encodes a protein. In certain such embodiments, the target nucleic acid is selected from: a mature mRNA and a pre-mRNA, including intronic, exonic and untranslated regions. In certain embodiments, the target nucleic acid is a mature mRNA. In certain embodiments, the target nucleic acid is a pre-mRNA. In certain embodiments, the target region is entirely within an intron. In certain embodiments, the target region spans an intron/exon junction. In certain embodiments, the target region is at least 50% within an intron.

### Complementarity/Mismatches to the Target Nucleic Acid

[0236] It is possible to introduce mismatch bases without eliminating activity. For example, Gautschi et al (J. Natl. Cancer Inst. 93:463-471, March 2001) demonstrated the ability of an oligonucleotide having 100% complementarity to the bcl-2 mRNA and having 3 mismatches to the bcl-xL mRNA to reduce the expression of both bcl-2 and bcl-xL in vitro and in vivo. Furthermore, this oligonucleotide demonstrated potent anti-tumor activity in vivo. Maher and Dolnick (Nuc. Acid. Res. 16:3341-3358, 1988) tested a series of tandem 14 nucleobase oligonucleotides, and a 28 and 42 nucleobase oligonucleotides comprised of the sequence of two or three of the tandem oligonucleotides, respectively, for their ability to arrest translation of human DHFR in a rabbit reticulocyte assay. Each of the three 14 nucleobase oligonucleotides alone was able to inhibit translation, albeit at a more modest level than the 28 or 42 nucleobase oligonucleotides.

[0237] In certain embodiments, oligonucleotides are complementary to the target nucleic acid over the entire length of the oligonucleotide. In certain embodiments, oligonucleotides are 99%, 95%, 90%, 85%, or 80% complementary to the target nucleic acid. In certain embodiments, oligonucleotides are at least 80% complementary to the target nucleic acid over the entire length of the oligonucleotide and comprise a portion that is 100% or fully complementary to a target nucleic acid. In certain embodiments, the portion of full complementarity is 6, 7, 8, 9, 10, 11, 12, 13, 14, 15, 16, 17, 18, 19, or 20 nucleobases in length.

[0238] In certain embodiments, oligonucleotides comprise one or more mismatched nucleobases relative to the target nucleic acid. In certain embodiments, the mismatch is at position 1, 2, 3, 4, 5, 6, 7, 8, 9, 10, 11, 12, 13, 14, 15, 16, 17, 18, 19, or 20 from the 5′-end of the oligonucleotide.

### SMN2

[0239] In certain embodiments, oligomeric compounds comprise or consist of a modified oligonucleotide that is complementary to a target nucleic acid encoding SMN2, or a portion thereof. In certain embodiments, SMN2 has the sequence set forth in SEQ ID NO: 1 (GENBANK Accession No. NT_006713.14 truncated from nucleotides 19939708 to 19967777).

[0240] In certain embodiments, contacting a cell with the oligomeric compound complementary to SEQ ID NO: 1 modulates the splicing of SMN2 RNA in a cell. In certain embodiments, contacting a cell with the oligomeric compound complementary to SEQ ID NO: 1 increases the amount of SMN2 RNA including exon 7. In certain embodiments, contacting a cell with the oligomeric compound complementary to SEQ ID NO: 1 increases full-length SMN2 protein expression. In certain embodiments, the oligomeric compound consists of a modified oligonucleotide.

[0241] In certain embodiments, contacting a cell in a subject with an oligomeric compound complementary to SEQ ID NO: 1 ameliorates one or more symptom of a neurodegenerative disease. In certain embodiments, the neurodegenerative disease is SMA, including Type I SMA, Type II SMA, Type III SMA, and Type IV SMA. In certain embodiments, the symptom is any of reduced muscle strength; inability or reduced ability to sit upright, to stand, and/or walk; reduced neuromuscular activity; reduced electrical activity in one or more muscles; reduced respiration; inability or reduced ability to eat, drink, and/or breathe without assistance; loss of weight or reduced weight gain; and/or decreased survival.

[0242] In certain embodiments, an oligomeric compound complementary to SEQ ID NO: 1 is capable of increasing SMN2 RNA including exon 7 in vivo by at least 1 fold, 2 fold, or 3 fold when administered according to the standard in vivo assay. In certain embodiments, an oligomeric compound complementary to SEQ ID NO: 1 is capable of increasing full-length SMN2 protein in vivo by at least 1 fold, 2 fold, or 3 fold when administered according to the standard in vivo assay.

### Certain Target Nucleic Acids in Certain Tissues

[0243] In certain embodiments, oligomeric compounds comprise or consist of an oligonucleotide comprising a portion that is complementary to a target nucleic acid, wherein the target nucleic acid is expressed in a pharmacologically relevant tissue. In certain embodiments, the pharmacologically relevant tissues are the cells and tissues that comprise the central nervous system (CNS). Such tissues include brain tissues, such as, spinal cord, cortex, and coronal brain tissue.

### Certain Pharmaceutical Compositions

[0244] In certain embodiments, described herein are pharmaceutical compositions comprising one or more oligomeric compounds. In certain embodiments, the one or more oligomeric compounds each consists of a modified oligonucleotide. In certain embodiments, the pharmaceutical composition comprises a pharmaceutically acceptable diluent or carrier. In certain embodiments, a pharmaceutical composition comprises or consists of a sterile saline solution and one or more oligomeric compound. In certain embodiments, the sterile saline is pharmaceutical grade saline. In certain embodiments, a pharmaceutical composition comprises or consists of one or more oligomeric compound and sterile water. In certain embodiments, the sterile water is pharmaceutical grade water. In certain embodiments, a pharmaceutical composition comprises or consists of one or more oligomeric compound and phosphate-buffered saline (PBS). In certain embodiments, the sterile PBS is pharmaceutical grade PBS. In certain embodiments, a pharmaceutical composition comprises or consists of one or more oligomeric compound and artificial cerebrospinal fluid (“artificial CSF” or “aCSF”). In certain embodiments, the artificial cerebrospinal fluid is pharmaceutical grade. In certain embodiments, a pharmaceutical composition comprises a modified oligonucleotide and artificial cerebrospinal fluid. In certain embodiments, a pharmaceutical composition consists of a modified oligonucleotide and artificial cerebrospinal fluid. In certain embodiments, a pharmaceutical composition consists essentially of a modified oligonucleotide and artificial cerebrospinal fluid. In certain embodiments, the artificial cerebrospinal fluid is pharmaceutical grade.

[0245] In certain embodiments, pharmaceutical compositions comprise one or more oligomeric compound and one or more excipients. In certain embodiments, excipients are selected from water, salt solutions, alcohol, polyethylene glycols, gelatin, lactose, amylase, magnesium stearate, talc, silicic acid, viscous paraffin, hydroxymethylcellulose and polyvinylpyrrolidone.

[0246] In certain embodiments, oligomeric compounds may be admixed with pharmaceutically acceptable active and/or inert substances for the preparation of pharmaceutical compositions or formulations. Compositions and methods for the formulation of pharmaceutical compositions depend on a number of criteria, including, but not limited to, route of administration, extent of disease, or dose to be administered.

[0247] In certain embodiments, pharmaceutical compositions comprising an oligomeric compound encompass any pharmaceutically acceptable salts of the oligomeric compound, esters of the oligomeric compound, or salts of such esters. In certain embodiments, pharmaceutical compositions comprising oligomeric compounds comprising one or more oligonucleotide, upon administration to a subject, including a human, are capable of providing (directly or indirectly) the biologically active metabolite or residue thereof. Accordingly, for example, the disclosure is also drawn to pharmaceutically acceptable salts of oligomeric compounds, prodrugs, pharmaceutically acceptable salts of such prodrugs, and other bioequivalents. Suitable pharmaceutically acceptable salts include, but are not limited to, sodium and potassium salts. In certain embodiments, prodrugs comprise one or more conjugate group attached to an oligonucleotide, wherein the conjugate group is cleaved by endogenous nucleases within the body. In certain embodiments, prodrugs comprise one or more conjugate group attached to an oligonucleotide, wherein the conjugate group is cleaved by endogenous nucleases within the body.

[0248] Lipid moieties have been used in nucleic acid therapies in a variety of methods. In certain such methods, the nucleic acid, such as an oligomeric compound, is introduced into preformed liposomes or lipoplexes made of mixtures of cationic lipids and neutral lipids. In certain methods, DNA complexes with mono- or poly-cationic lipids are formed without the presence of a neutral lipid. In certain embodiments, a lipid moiety is selected to increase distribution of a pharmaceutical agent to a particular cell or tissue. In certain embodiments, a lipid moiety is selected to increase distribution of a pharmaceutical agent to fat tissue. In certain embodiments, a lipid moiety is selected to increase distribution of a pharmaceutical agent to muscle tissue.

[0249] In certain embodiments, pharmaceutical compositions comprise a delivery system. Examples of delivery systems include, but are not limited to, liposomes and emulsions. Certain delivery systems are useful for preparing certain pharmaceutical compositions including those comprising hydrophobic compounds. In certain embodiments, certain organic solvents such as dimethylsulfoxide are used.

[0250] In certain embodiments, pharmaceutical compositions comprise one or more tissue-specific delivery molecules designed to deliver the one or more pharmaceutical agents comprising an oligomeric compound provided herein to specific tissues or cell types. For example, in certain embodiments, pharmaceutical compositions include liposomes coated with a tissue-specific antibody.

[0251] In certain embodiments, pharmaceutical compositions comprise a co-solvent system. Certain of such co-solvent systems comprise, for example, benzyl alcohol, a nonpolar surfactant, a water-miscible organic polymer, and an aqueous phase. In certain embodiments, such co-solvent systems are used for hydrophobic compounds. A non-limiting example of such a co-solvent system is the VPD co-solvent system, which is a solution of absolute ethanol comprising 3% w/v benzyl alcohol, 8% w/v of the nonpolar surfactant Polysorbate 80™ and 65% w/v polyethylene glycol 300. The proportions of such co-solvent systems may be varied considerably without significantly altering their solubility and toxicity characteristics. Furthermore, the identity of co-solvent components may be varied: for example, other surfactants may be used instead of Polysorbate 80™; the fraction size of polyethylene glycol may be varied; other biocompatible polymers may replace polyethylene glycol, e.g., polyvinyl pyrrolidone; and other sugars or polysaccharides may substitute for dextrose.

[0252] In certain embodiments, pharmaceutical compositions are prepared for oral administration. In certain embodiments, pharmaceutical compositions are prepared for buccal administration. In certain embodiments, a pharmaceutical composition is prepared for administration by injection (e.g., intravenous, subcutaneous, intramuscular, intrathecal (IT), intracerebroventricular (ICV), etc.). In certain of such embodiments, a pharmaceutical composition comprises a carrier and is formulated in aqueous solution, such as water or physiologically compatible buffers such as Hanks's solution, Ringer's solution, or physiological saline buffer. In certain embodiments, other ingredients are included (e.g., ingredients that aid in solubility or serve as preservatives). In certain embodiments, injectable suspensions are prepared using appropriate liquid carriers, suspending agents and the like. Certain pharmaceutical compositions for injection are presented in unit dosage form, e.g., in ampoules or in multi-dose containers. Certain pharmaceutical compositions for injection are suspensions, solutions or emulsions in oily or aqueous vehicles, and may contain formulatory agents such as suspending, stabilizing and/or dispersing agents. Certain solvents suitable for use in pharmaceutical compositions for injection include, but are not limited to, lipophilic solvents and fatty oils, such as sesame oil, synthetic fatty acid esters, such as ethyl oleate or triglycerides, and liposomes.

[0253] Under certain conditions, certain compounds disclosed herein act as acids. Although such compounds may be drawn or described in protonated (free acid) form, or ionized and in association with a cation (salt) form, aqueous solutions of such compounds exist in equilibrium among such forms. For example, a phosphate linkage of an oligonucleotide in aqueous solution exists in equilibrium among free acid, anion and salt forms. Unless otherwise indicated, compounds described herein are intended to include all such forms. Moreover, certain oligonucleotides have several such linkages, each of which is in equilibrium. Thus, oligonucleotides in solution exist in an ensemble of forms at multiple positions all at equilibrium. The term “oligonucleotide” is intended to include all such forms. Drawn structures necessarily depict a single form. Nevertheless, unless otherwise indicated, such drawings are likewise intended to include corresponding forms. Herein, a structure depicting the free acid of a compound followed by the term “or a salt thereof” expressly includes all such forms that may be fully or partially protonated/de-protonated/in association with a cation. In certain instances, one or more specific cation is identified.

[0254] In certain embodiments, modified oligonucleotides or oligomeric compounds are in aqueous solution with sodium. In certain embodiments, modified oligonucleotides or oligomeric compounds are in aqueous solution with potassium. In certain embodiments, modified oligonucleotides or oligomeric compounds are in PBS. In certain embodiments, modified oligonucleotides or oligomeric compounds are in water. In certain such embodiments, the pH of the solution is adjusted with NaOH and/or HCl to achieve a desired pH.

[0255] Herein, certain specific doses are described. A dose may be in the form of a dosage unit. For clarity, a dose (or dosage unit) of a modified oligonucleotide or an oligomeric compound in milligrams indicates the mass of the free acid form of the modified oligonucleotide or oligomeric compound. As described above, in aqueous solution, the free acid is in equilibrium with anionic and salt forms. However, for the purpose of calculating dose, it is assumed that the modified oligonucleotide or oligomeric compound exists as a solvent-free, sodium-acetate free, anhydrous, free acid. For example, where a modified oligonucleotide or an oligomeric compound is in solution comprising sodium (e.g., saline), the modified oligonucleotide or oligomeric compound may be partially or fully de-protonated and in association with Na+ ions. However, the mass of the protons are nevertheless counted toward the weight of the dose, and the mass of the Na+ ions are not counted toward the weight of the dose. Thus, for example, a dose, or dosage unit, of 10 mg of Compound No. 1263789, Compound No. 1287717, Compound No. 1287745, and Compound No. 1358996 equals the number of fully protonated molecules that weighs 10 mg. This would be equivalent to 10.53 mg of solvent-free, sodium acetate-free, anhydrous sodiated Compound No. 1263789, 10.53 mg of solvent-free, sodium acetate-free, anhydrous sodiated Compound No. 1287717, 10.52 mg of solvent-free, sodium acetate-free, anhydrous sodiated Compound No. 1287745, and 10.51 mg of solvent-free, sodium acetate-free, anhydrous sodiated Compound No. 1358996. When an oligomeric compound comprises a conjugate group, the mass of the conjugate group is included in calculating the dose of such oligomeric compound. If the conjugate group also has an acid, the conjugate group is likewise assumed to be fully protonated for the purpose of calculating dose.

### Certain Compositions

### Compound No: 1263789

[0256] In certain embodiments, Compound No. 1263789 is characterized as a modified oligonucleotide having a sequence of (from 5′ to 3′) CACTTTCATAATGCTGGC (SEQ ID NO: 21), wherein each nucleoside comprises a 2′-MOE sugar moiety, wherein the internucleoside linkages between nucleosides 2 to 3 and 4 to 5 are phosphodiester internucleoside linkages and the internucleoside linkages between nucleosides 1 to 2, 3 to 4, 5 to 6, 6 to 7, 7 to 8, 8 to 9, 9 to 10, 10 to 11, 11 to 12, 12 to 13, 13 to 14, 14 to 15, 15 to 16, 16 to 17, and 17 to 18 are phosphorothioate internucleoside linkages, and wherein each cytosine is a 5-methyl cytosine.

[0257] In certain embodiments, Compound No. 1263789 is represented by the following chemical notation (5′ to 3′): ^{m}Cₑₛ Aₑₒ ^{m}Cₑₛ Tₑₒ Tₑₛ Tₑₛ ^{m}Cₑₛ Aₑₛ Tₑₛ Aₑₛ Aₑₛ Tₑₛ Gₑₛ ^{m}Cₑₛ Tₑₛ Gₑₛ Gₑₛ ^{m}Cₑ (SEQ ID NO: 21),

wherein,
[0258] A=an adenine nucleobase,
[0259] ^{m}C=a 5-methyl cytosine nucleobase,
[0260] G=a guanine nucleobase,
[0261] T=a thymine nucleobase,
[0262] e=a 2′-MOE sugar moiety,
[0263] s=a phosphorothioate internucleoside linkage, and
[0264] o=a phosphodiester internucleoside linkage.

[0265] In certain embodiments, Compound No. 1263789 is represented by the following chemical structure:

[chemical structure]

### Structure 1. Compound No. 1263789

[0266] In certain embodiments, the sodium salt of Compound No. 1263789 is represented by the following chemical structure:

[chemical structure]

Structure 2. The sodium salt of Compound No. 1263789

### Compound No: 1287717

[0267] In certain embodiments, Compound No. 1287717 is characterized as a modified oligonucleotide having a sequence of (from 5′ to 3′) TTCACTTTCATAATGCTGGC (SEQ ID NO: 22), wherein each nucleoside comprises a 2′-MOE sugar moiety, wherein the internucleoside linkages between nucleosides 1 to 2 and 19 to 20 are phosphodiester internucleoside linkages and the internucleoside linkages between nucleosides 2 to 3, 3 to 4, 4 to 5, 5 to 6, 6 to 7, 7 to 8, 8 to 9, 9 to 10, 10 to 11, 11 to 12, 12 to 13, 13 to 14, 14 to 15, 15 to 16, 16 to 17, 17 to 18, and 18 to 19 are phosphorothioate internucleoside linkages, and wherein each cytosine is a 5-methyl cytosine.

[0268] In certain embodiments, Compound No. 1287717 is represented by the following chemical notation (5′ to 3′): Tₑₒ Tₑₛ ^{m}Cₑₛ Aₑₛ ^{m}Cₑₛ Tₑₛ Tₑₛ Tₑₛ ^{m}Cₑₛ Aₑₛ Tₑₛ Aₑₛ Aₑₛ Tₑₛ Gₑₛ ^{m}Cₑₛ Tₑₛ Gₑₛ Gₑₒ ^{m}Cₑ (SEQ ID NO: 22)

wherein,
[0269] A=an adenine nucleobase,
[0270] ^{m}C=a 5-methyl cytosine nucleobase,
[0271] G=a guanine nucleobase,
[0272] T=a thymine nucleobase,
[0273] e=a 2′-MOE sugar moiety,
[0274] s=a phosphorothioate internucleoside linkage, and
[0275] o=a phosphodiester internucleoside linkage.

[0276] In certain embodiments, Compound No. 1287717 is represented by the following chemical structure:

[chemical structure]

### Structure 3. Compound No. 1287717

[0277] In certain embodiments, the sodium salt of Compound No. 1287717 is represented by the following chemical structure:

[chemical structure]

### Structure 4. The Sodium Salt of Compound No. 1287717

### Compound No: 1287745

[0278] In certain embodiments, Compound No. 1287745 is characterized as a modified oligonucleotide having a sequence of (from 5′ to 3′) TTCACTTTCATAATGCTGGC (SEQ ID NO: 51), wherein each of nucleosides 1 and 20 comprises a 2′-MOE sugar moiety, each of nucleosides 2-19 comprises a 2′-NMA sugar moiety, wherein the internucleoside linkages between nucleosides 1 to 2 and 19 to 20 are phosphodiester internucleoside linkages and the internucleoside linkages between nucleosides 2 to 3, 3 to 4, 4 to 5, 5 to 6, 6 to 7, 7 to 8, 8 to 9, 9 to 10, 10 to 11, 11 to 12, 12 to 13, 13 to 14, 14 to 15, 15 to 16, 16 to 17, 17 to 18, and 18 to 19 are phosphorothioate internucleoside linkages, and wherein each cytosine is a 5-methyl cytosine.

[0279] In certain embodiments, Compound No. 1287745 is represented by the following chemical notation (5′ to 3′): Tₑₒ Tₙₛ ^{m}Cₙₛ ^{m}Cₙₛ Tₙₛ ^{m}Cₙₛ Aₙₛ Tₙₛ Aₙₛ Aₙₛ Tₙₛ Gₙₛ ^{m}Cₙₛ Tₙₛ Gₙₛ Gₙₒ ^{m}Cₑ (SEQ ID NO: 51) wherein,
[0280] A=an adenine nucleobase,
[0281] ^{m}C=a 5-methyl cytosine nucleobase,
[0282] G=a guanine nucleobase,
[0283] T=a thymine nucleobase,
[0284] e=a 2′-MOE sugar moiety,
[0285] n=a 2′-NMA sugar moiety,
[0286] s=a phosphorothioate internucleoside linkage, and
[0287] o=a phosphodiester internucleoside linkage.

[0288] In certain embodiments, Compound No. 1287745 is represented by the following chemical structure:

[chemical structure]

### Structure 5. Compound No. 1287745

[0289] In certain embodiments, the sodium salt of Compound No. 1287745 is represented by the following chemical structure:

[chemical structure]

### Structure 6. The Sodium Salt of Compound No. 1287745

### Compound No: 1358996

[0290] In certain embodiments, Compound No. 1358996 is characterized as modified oligonucleotide having a sequence of (from 5′ to 3′) CACTTTCATAATGCTGGC (SEQ ID NO: 52), wherein each nucleoside comprises a 2′-NMA sugar moiety, wherein the internucleoside linkages between nucleosides 2 to 3 and 4 to 5 are phosphodiester internucleoside linkages and the internucleoside linkages between nucleosides 1 to 2, 3 to 4, 5 to 6, 6 to 7, 7 to 8, 8 to 9, 9 to 10, 10 to 11, 11 to 12, 12 to 13, 13 to 14, 14 to 15, 15 to 16, 16 to 17, and 17 to 18 are phosphorothioate internucleoside linkages, and wherein each cytosine is a 5-methyl cytosine.

[0291] In certain embodiments, Compound No. 1358996 is represented by the following chemical notation (5′ to 3′): ^{m}Cₙₛ ^{m}Cₙₛ Tₙₒ Tₙₛ Tₙₛ ^{m}Cₙₛ Aₙₛ Tₙₛ Aₙₛ Aₙₛ Tₙₛ Gₙₛ ^{m}Cₙₛ Tₙₛ Gₙₛ Gₙₛ ^{m}Cₙ (SEQ ID NO: 52)

wherein,
[0292] A=an adenine nucleobase,
[0293] ^{m}C=a 5-methyl cytosine nucleobase,
[0294] G=a guanine nucleobase,
[0295] T=a thymine nucleobase,
[0296] n=a 2′-NMA sugar moiety,
[0297] s=a phosphorothioate internucleoside linkage, and
[0298] o=a phosphodiester internucleoside linkage.

[0299] In certain embodiments, Compound No. 1358996 is represented by the following chemical structure:

[chemical structure]

### Structure 7. Compound No. 1358996

[0300] In certain embodiments, the sodium salt of Compound No. 1358996 is represented by the following chemical structure:

[chemical structure]

### Structure 8. The Sodium Salt of Compound No. 1358996

### Certain Comparator Compositions

[0301] In certain embodiments, Spinraza® (generic name nusinersen; Compound No. 396443), approved for treatment of SMA, is a comparator compound (See, e.g., Chiroboga, et al., Neurology, 86(10): 890-897, 2016; Finkel, et al., Lancet, 338(10063): 3017-3026, 2016; Finkel, et al., N. Engl. J. Med., 377(18):1723-1732 2017; Mercuri, et al., N. Engl. J. Med., 378(7):625-635, 2018; Montes, et al., Muscle Nerve. 60(4): 409-414, 2019; Darras, et al., Neurology, 92(21):e2492-e2506, 2019). Spinraza® was previously described in WO2010120820, incorporated herein by reference, and has a sequence (from 5′ to 3′) of TCACTTTCATAATGCTGG (SEQ ID NO: 355), wherein each nucleoside comprises a 2′-MOE sugar moiety, each internucleoside linkage is a phosphorothioate internucleoside linkage, and each cytosine is a 5-methyl cytosine.

[0302] In certain embodiments, although not approved for human therapy, other previously described compounds, including Compound Nos. 387954, 396442, 443305, and 819735, are comparator compounds.

[0303] Compound No. 387954 was previously described in WO 2014/179620, incorporated herein by reference. Compound No. 387954 has a sequence (from 5′ to 3′) of ATTCACTTTCATAATGCTGG (SEQ ID NO: 20), wherein each nucleoside comprises a 2′-MOE sugar moiety, each internucleoside linkage is a phosphorothioate internucleoside linkage, and each cytosine is a 5-methyl cytosine.

[0304] Compound No. 396442 was previously described in WO 2010/120820, incorporated herein by reference. Compound No. 396442 has a sequence (from 5′ to 3′) of CACTTTCATAATGCTGGC (SEQ ID NO: 53), wherein each nucleoside comprises a 2′-MOE sugar moiety, each internucleoside linkage is a phosphorothioate internucleoside linkage, and each cytosine is a 5-methyl cytosine.

[0305] Compound No. 443305 was previously described in WO 2018/014041, incorporated herein by reference. Compound No. 443305 has a sequence (from 5′ to 3′) of TCACTTTCATAATGCTGG (SEQ ID NO: 54), wherein each nucleoside comprises a 2′-NMA sugar moiety, each internucleoside linkage is a phosphorothioate internucleoside linkage, and each cytosine is a 5-methyl cytosine.

[0306] Compound No. 819735 was previously described in WO 2018/014041, incorporated herein by reference. Compound No. 819735 has a sequence (from 5′ to 3′) of CACTTTCATAATGCTGGC (SEQ ID NO: 55), wherein each nucleoside comprises a 2′-NMA sugar moiety, each internucleoside linkage is a phosphorothioate internucleoside linkage, and each cytosine is a 5-methyl cytosine.

TABLE 1
Certain Comparator Compositions

| | | | | SEQ | |
|---|---|---|---|---|---|
| Compound | Nucleobase Sequence | | Internucleoside | ID | |
| Number | (5′ to 3′) | Sugar Motif | Linkage Motif | NO: | Reference Number |
| 396443 | TCACTTTCATAATGCTGG | Full 2′- MOE | Full PS | 23 | WO 2010/120820 |
| 387954 | ATTCACTTTCATAATGCTGG | Full 2′- MOE | Full PS | 20 | WO 2014/179620 |
| 396442 | CACTTTCATAATGCTGGC | Full 2′- MOE | Full PS | 21 | WO 2010/120820 |
| 443305 | TCACTTTCATAATGCTGG | Full 2′- NMA | Full PS | 23 | WO 2018/014041 |
| 819735 | CACTTTCATAATGCTGGC | Full 2′- NMA | Full PS | 21 | WO 2018/014041 |

[0307] In certain embodiments, compounds described herein are superior relative to compounds described in WO 2007/002390, WO2010/120820, WO 2015/161170, and WO 2018/014041, because they demonstrate one or more improved properties, such as, potency, efficacy, and tolerability.

[0308] For example, Compound No. 1263789, Compound No. 1287745, and Compound No. 1358996 each demonstrated improved potency in vivo as compared to Compound No. 396443. As shown in Example 5, Compound No. 1263789, Compound No. 1287745, and Compound No. 1358996 achieved an ED₅₀ in spinal cord of 13.3, 8.8, and 7.4, respectively. In comparison, Compound No. 396443 achieved an ED₅₀ in spinal cord of 22.0. Therefore, each of Compound No. 1263789, Compound No. 1287745, and Compound No. 1358996 are more potent than Compound No. 396443 in this assay.

[0309] For example, Compound No. 1263789, Compound No. 1287717, Compound No. 1287745, and Compound No. 1358996 each demonstrated improved 3 hour FOB scores as compared to Compound No. 396443, Compound No. 387954, and Compound No. 443305. As shown in Example 6, at 700 μg, Compound No. 1263789, Compound No. 1287717, Compound No. 1287745, and Compound No. 1358996 achieved 3 hour FOB scores of 0, 3.25, 1, and 0, respectively. In comparison, at half the dose (350 μg) Compound No. 396443 achieved a 3 hour FOB score of 4.0; and at the same dose (700 μg) Compound No. 387954 and Compound No. 443305 achieved a 3 hour FOB score of 4.0 and 4.75, respectively. Therefore, each of Compound No. 1263789, Compound No. 1287717, Compound No. 1287745, and Compound No. 1358996 are more tolerable than Compound No. 396443, Compound No. 387954, and Compound No. 443305 in this assay.

[0310] For example, Compound No. 1263789, Compound No. 1287717, Compound No. 1287745, and Compound No. 1358996 each demonstrated improved long-term tolerability as compared to Compound No. 396442 and Compound No. 819735. As shown in Example 7, Compound No. 1263789, Compound No. 1287717, Compound No. 1287745, and Compound No. 1358996 demonstrated no adverse events, no Purkinje cell loss, and cortex GFAP mRNA less than 2-fold of control. In comparison, 396442 and 819735 each demonstrated adverse events, Purkinje cell loss, and cortex GFAP mRNA greater than 2-fold of control in certain treated animals. Therefore, each of Compound No. 1263789, Compound No. 1287717, Compound No. 1287745, and Compound No. 1358996 are more tolerable than Compound No. 396442 and Compound No. 819735 in this assay.

### Nonlimiting Disclosure and Incorporation by Reference

[0311] Each of the literature and patent publications listed herein is incorporated by reference in its entirety. While certain compounds, compositions and methods described herein have been described with specificity in accordance with certain embodiments, the following examples serve only to illustrate the compounds described herein and are not intended to limit the same. Each of the references, GenBank accession numbers, and the like recited in the present application is incorporated herein by reference in its entirety.

[0312] Although the sequence listing accompanying this filing identifies each sequence as either “RNA” or “DNA” as required, in reality, those sequences may be modified with any combination of chemical modifications. One of skill in the art will readily appreciate that such designation as “RNA” or “DNA” to describe modified oligonucleotides is, in certain instances, arbitrary. For example, an oligonucleotide comprising a nucleoside comprising a 2′-OH sugar moiety and a thymine base could be described as a DNA having a modified sugar moiety (2′-OH in place of one 2′-H of DNA) or as an RNA having a modified base (thymine (methylated uracil) in place of a uracil of RNA). Accordingly, nucleic acid sequences provided herein, including, but not limited to those in the sequence listing, are intended to encompass nucleic acids containing any combination of natural or modified RNA and/or DNA, including, but not limited to such nucleic acids having modified nucleobases. By way of further example and without limitation, an oligomeric compound having the nucleobase sequence “ATCGATCG” encompasses any oligomeric compounds having such nucleobase sequence, whether modified or unmodified, including, but not limited to, such compounds comprising RNA bases, such as those having sequence “AUCGAUCG” and those having some DNA bases and some RNA bases such as “AUCGATCG” and oligomeric compounds having other modified nucleobases, such as “AT^{m}CGAUCG,” wherein ^{m}C indicates a cytosine base comprising a methyl group at the 5-position.

[0313] Certain compounds described herein (e.g., modified oligonucleotides) have one or more asymmetric center and thus give rise to enantiomers, diastereomers, and other stereoisomeric configurations that may be defined, in terms of absolute stereochemistry, as (R) or (S), as α or β such as for sugar anomers, or as (D) or (L), such as for amino acids, etc. Compounds provided herein that are drawn or described as having certain stereoisomeric configurations include only the indicated compounds. Compounds provided herein that are drawn or described with undefined stereochemistry include all such possible isomers, including their stereorandom and optically pure forms, unless specified otherwise. Likewise, all cis- and trans-isomers and tautomeric forms of the compounds herein are also included unless otherwise indicated. Oligomeric compounds described herein include chirally pure or enriched mixtures as well as racemic mixtures. For example, oligomeric compounds having a plurality of phosphorothioate internucleoside linkages include such compounds in which chirality of the phosphorothioate internucleoside linkages is controlled or is random. Unless otherwise indicated, compounds described herein are intended to include corresponding salt forms.

[0314] The compounds described herein include variations in which one or more atoms are replaced with a non-radioactive isotope or radioactive isotope of the indicated element. For example, compounds herein that comprise hydrogen atoms encompass all possible deuterium substitutions for each of the ¹H hydrogen atoms. Isotopic substitutions encompassed by the compounds herein include but are not limited to: ²H or ³H in place of ¹H, ¹³C or ¹⁴C in place of ¹²C, ¹⁵N in place of ¹⁴N, ¹⁷O or ¹⁸O in place of ¹⁶O, and ³³S, ³⁴S, ³⁵S, or ³⁶S in place of ³²S. In certain embodiments, non-radioactive isotopic substitutions may impart new properties on the oligomeric compound that are beneficial for use as a therapeutic or research tool. In certain embodiments, radioactive isotopic substitutions may make the compound suitable for research or diagnostic purposes such as imaging.

### EXAMPLES

[0315] The following examples illustrate certain embodiments of the present disclosure and are not limiting. Moreover, where specific embodiments are provided, the inventors have contemplated generic application of those specific embodiments.

### Example 1: Design of Modified Oligonucleotides Complementary to a Human SMN2 Nucleic Acid

[0316] Modified oligonucleotides complementary to a human SMN2 nucleic acid were designed and synthesized as indicated in the tables below.

[0317] The modified oligonucleotides in the tables below are 16, 17, 18, 19, or 20 nucleosides in length, as specified. The modified oligonucleotides comprise 2′-MOE sugar moieties, 2′-NMA sugar moieties, cEt sugar moieties, 2′-OMe sugar moieties, and/or 2′-β-D-deoxyribosyl sugar moieties, as specified. Each internucleoside linkage throughout the modified oligonucleotides is either a phosphorothioate internucleoside linkage or a phosphodiester internucleoside linkage, as specified. Cytosines are either non-methylated cytosines or 5-methyl cytosines, as specified.

[0318] Each modified oligonucleotide listed in the tables below is 100% complementary to SEQ ID NO: 1 (GENBANK Accession No. NT_006713.14 truncated from nucleotides 19939708 to 19967777), unless specifically stated otherwise. Non-complementary nucleobases are specified in the Nucleobase Sequence column in underlined, bold, italicized font. Each modified oligonucleotide listed in the tables below targets an active site on the SMN2 transcript for inclusion of exon 7. “Start site” indicates the 5′-most nucleoside to which the modified oligonucleotide is complementary in the target nucleic acid sequence. “Stop site” indicates the 3′-most nucleoside to which the modified oligonucleotide is complementary in the target nucleic acid sequence.

### Table 2

[0319] The modified oligonucleotides in Table 2 below are 16, 17, 18, 19 or 20 nucleosides in length. Each nucleoside comprises a 2′-MOE sugar moiety. The sugar motif for each modified oligonucleotide is provided in the Sugar Motif column, wherein each ‘e’ represents a 2′-MOE sugar moiety. Each internucleoside linkage is either a phosphorothioate internucleoside linkage or a phosphodiester internucleoside linkage. The internucleoside linkage motif for each modified oligonucleotide is provided in the Internucleoside Linkage Motif column, wherein each ‘s’ represents a phosphorothioate internucleoside linkage, and each ‘o’ represents a phosphodiester internucleoside linkage. Each cytosine is a 5-methyl cytosine.

[0320] Each modified oligonucleotide listed in Table 2 below is 100% complementary to SEQ ID NO: 1 (GENBANK Accession No. NT_006713.14 truncated from nucleotides 19939708 to 19967777), unless specifically stated otherwise. Non-complementary nucleobases are specified in the Nucleobase Sequence column in underlined, bold, italicized font. “Start site” indicates the 5′-most nucleoside to which the modified oligonucleotide is complementary in the target nucleic acid sequence. “Stop site” indicates the 3′-most nucleoside to which the modified oligonucleotide is complementary in the target nucleic acid sequence.

TABLE 2
2′-MOE modified oligonucleotides with PS or mixed PS/PO internucleoside linkages

| | | | | SEQ | SEQ | |
|---|---|---|---|---|---|---|
| | | | | ID | ID | |
| | | | | No: 1 | No: 1 | SEQ |
| Compound | Nucleobase Sequence | Sugar Motif | Internucleoside | Start | Stop | ID |
| Number | (5′ to 3′) | (5′ to 3′) | Linkage Motif (5′ to 3′) | Site | Site | No. |
| 1287063 | ACTTTCATAATGCTGGCAG | eeeeeeeeeeeeeeeeeee | ssssssssssssssssss | 27059 | 27077 | 24 |
| 1287048 | CACTTTCATAATGCTGGCAG | eeeeeeeeeeeeeeeeeeee | sssssssssssssssssss | 27059 | 27078 | 25 |
| 1287064 | CACTTTCATAATGCTGGCA | eeeeeeeeeeeeeeeeeee | ssssssssssssssssss | 27060 | 27078 | 26 |
| 1287049 | TCACTTTCATAATGCTGGCA | eeeeeeeeeeeeeeeeeeee | sssssssssssssssssss | 27060 | 27079 | 27 |
| 1210340 | CTTTCATAATGCTGGC | eeeeeeeeeeeeeeee | sssssssssssssss | 27061 | 27076 | 28 |
| 1212868 | CTTTCATAATGCTGGC | eeeeeeeeeeeeeeee | sssssssssooooss | 27061 | 27076 | 28 |
| 1212867 | CTTTCATAATGCTGGC | eeeeeeeeeeeeeeee | ssssssssoooosss | 27061 | 27076 | 28 |
| 1212863 | CTTTCATAATGCTGGC | eeeeeeeeeeeeeeee | ssssssooossssss | 27061 | 27076 | 28 |
| 1212866 | CTTTCATAATGCTGGC | eeeeeeeeeeeeeeee | ssssssoooosssss | 27061 | 27076 | 28 |
| 1212861 | CTTTCATAATGCTGGC | eeeeeeeeeeeeeeee | sssssooooosssss | 27061 | 27076 | 28 |
| 1212860 | CTTTCATAATGCTGGC | eeeeeeeeeeeeeeee | sssssoooooossss | 27061 | 27076 | 28 |
| 1212865 | CTTTCATAATGCTGGC | eeeeeeeeeeeeeeee | ssssoooosssssss | 27061 | 27076 | 28 |
| 1212859 | CTTTCATAATGCTGGC | eeeeeeeeeeeeeeee | ssssooooooossss | 27061 | 27076 | 28 |
| 1212851 | CTTTCATAATGCTGGC | eeeeeeeeeeeeeeee | sssosssosssosss | 27061 | 27076 | 28 |
| 1212850 | CTTTCATAATGCTGGC | eeeeeeeeeeeeeeee | ssosssssssssoss | 27061 | 27076 | 28 |
| 1212852 | CTTTCATAATGCTGGC | eeeeeeeeeeeeeeee | ssossossossosss | 27061 | 27076 | 28 |
| 1212853 | CTTTCATAATGCTGGC | eeeeeeeeeeeeeeee | ssossossosososs | 27061 | 27076 | 28 |
| 1212854 | CTTTCATAATGCTGGC | eeeeeeeeeeeeeeee | ssososososososs | 27061 | 27076 | 28 |
| 1212864 | CTTTCATAATGCTGGC | eeeeeeeeeeeeeeee | ssoooosssssssss | 27061 | 27076 | 28 |
| 1212855 | CTTTCATAATGCTGGC | eeeeeeeeeeeeeeee | soossssssssooss | 27061 | 27076 | 28 |
| 1212856 | CTTTCATAATGCTGGC | eeeeeeeeeeeeeeee | sooosssssssooss | 27061 | 27076 | 28 |
| 1212857 | CTTTCATAATGCTGGC | eeeeeeeeeeeeeeee | sooossssssoooss | 27061 | 27076 | 28 |
| 1212858 | CTTTCATAATGCTGGC | eeeeeeeeeeeeeeee | soooosssssoooss | 27061 | 27076 | 28 |
| 1210339 | ACTTTCATAATGCTGGC | eeeeeeeeeeeeeeeee | ssssssssssssssss | 27061 | 27077 | 29 |
| 1212849 | ACTTTCATAATGCTGGC | eeeeeeeeeeeeeeeee | ssssssssssooooss | 27061 | 27077 | 29 |
| 1212848 | ACTTTCATAATGCTGGC | eeeeeeeeeeeeeeeee | ssssssssoooossss | 27061 | 27077 | 29 |
| 1212845 | ACTTTCATAATGCTGGC | eeeeeeeeeeeeeeeee | sssssssooossssss | 27061 | 27077 | 29 |
| 1212844 | ACTTTCATAATGCTGGC | eeeeeeeeeeeeeeeee | ssssssoooossssss | 27061 | 27077 | 29 |
| 1212843 | ACTTTCATAATGCTGGC | eeeeeeeeeeeeeeeee | ssssssooooosssss | 27061 | 27077 | 29 |
| 1212842 | ACTTTCATAATGCTGGC | eeeeeeeeeeeeeeeee | sssssoooooosssss | 27061 | 27077 | 29 |
| 1212841 | ACTTTCATAATGCTGGC | eeeeeeeeeeeeeeeee | sssssooooooossss | 27061 | 27077 | 29 |
| 1212847 | ACTTTCATAATGCTGGC | eeeeeeeeeeeeeeeee | ssssoooossssssss | 27061 | 27077 | 29 |
| 1212832 | ACTTTCATAATGCTGGC | eeeeeeeeeeeeeeeee | ssossssssssssoss | 27061 | 27077 | 29 |
| 1212833 | ACTTTCATAATGCTGGC | eeeeeeeeeeeeeeeee | ssosssssossssoss | 27061 | 27077 | 29 |
| 1212834 | ACTTTCATAATGCTGGC | eeeeeeeeeeeeeeeee | ssosssosssossoss | 27061 | 27077 | 29 |
| 1212835 | ACTTTCATAATGCTGGC | eeeeeeeeeeeeeeeee | ssossossossososs | 27061 | 27077 | 29 |
| 1212836 | ACTTTCATAATGCTGGC | eeeeeeeeeeeeeeeee | ssososososososss | 27061 | 27077 | 29 |
| 1212846 | ACTTTCATAATGCTGGC | eeeeeeeeeeeeeeeee | ssoooossssssssss | 27061 | 27077 | 29 |
| 1212837 | ACTTTCATAATGCTGGC | eeeeeeeeeeeeeeeee | soosssssssssooss | 27061 | 27077 | 29 |
| 1212838 | ACTTTCATAATGCTGGC | eeeeeeeeeeeeeeeee | sooossssssssooss | 27061 | 27077 | 29 |
| 1212839 | ACTTTCATAATGCTGGC | eeeeeeeeeeeeeeeee | sooosssssssoooss | 27061 | 27077 | 29 |
| 1212840 | ACTTTCATAATGCTGGC | eeeeeeeeeeeeeeeee | soooossssssoooss | 27061 | 27077 | 29 |
| 1263814 | CACTTTCATAATGCTGGC | eeeeeeeeeeeeeeeeee | ssossssssssssssss | 27061 | 27078 | 21 |
| 1263816 | CACTTTCATAATGCTGGC | eeeeeeeeeeeeeeeeee | ssssossssssssssss | 27061 | 27078 | 21 |
| 1263818 | CACTTTCATAATGCTGGC | eeeeeeeeeeeeeeeeee | ssssssossssssssss | 27061 | 27078 | 21 |
| 1263820 | CACTTTCATAATGCTGGC | eeeeeeeeeeeeeeeeee | ssssssssossssssss | 27061 | 27078 | 21 |
| 1263822 | CACTTTCATAATGCTGGC | eeeeeeeeeeeeeeeeee | ssssssssssossssss | 27061 | 27078 | 21 |
| 1263824 | CACTTTCATAATGCTGGC | eeeeeeeeeeeeeeeeee | ssssssssssssossss | 27061 | 27078 | 21 |
| 1263826 | CACTTTCATAATGCTGGC | eeeeeeeeeeeeeeeeee | ssssssssssssssoss | 27061 | 27078 | 21 |
| 1210342 | CACTTTCATAATGCTGGC | eeeeeeeeeeeeeeeeee | ssosssssssssssoss | 27061 | 27078 | 21 |
| 1263778 | CACTTTCATAATGCTGGC | eeeeeeeeeeeeeeeeee | sossssssssssssoss | 27061 | 27078 | 21 |
| 1263781 | CACTTTCATAATGCTGGC | eeeeeeeeeeeeeeeeee | sosssssssssosssss | 27061 | 27078 | 21 |
| 1263783 | CACTTTCATAATGCTGGC | eeeeeeeeeeeeeeeeee | sosssssssosssssss | 27061 | 27078 | 21 |
| 1263785 | CACTTTCATAATGCTGGC | eeeeeeeeeeeeeeeeee | sosssssosssssssss | 27061 | 27078 | 21 |
| 1263787 | CACTTTCATAATGCTGGC | eeeeeeeeeeeeeeeeee | sosssosssssssssss | 27061 | 27078 | 21 |
| 1263789 | CACTTTCATAATGCTGGC | eeeeeeeeeeeeeeeeee | sososssssssssssss | 27061 | 27078 | 21 |
| 1263791 | CACTTTCATAATGCTGGC | eeeeeeeeeeeeeeeeee | ssssosssssssssoss | 27061 | 27078 | 21 |
| 1263793 | CACTTTCATAATGCTGGC | eeeeeeeeeeeeeeeeee | ssssssosssssssoss | 27061 | 27078 | 21 |
| 1263795 | CACTTTCATAATGCTGGC | eeeeeeeeeeeeeeeeee | ssssssssosssssoss | 27061 | 27078 | 21 |
| 1263797 | CACTTTCATAATGCTGGC | eeeeeeeeeeeeeeeeee | ssssssssssosssoss | 27061 | 27078 | 21 |
| 1263799 | CACTTTCATAATGCTGGC | eeeeeeeeeeeeeeeeee | ssssssssssssososs | 27061 | 27078 | 21 |
| 1263800 | CACTTTCATAATGCTGGC | eeeeeeeeeeeeeeeeee | soossssssssssssss | 27061 | 27078 | 21 |
| 1263802 | CACTTTCATAATGCTGGC | eeeeeeeeeeeeeeeeee | sssoossssssssssss | 27061 | 27078 | 21 |
| 1263804 | CACTTTCATAATGCTGGC | eeeeeeeeeeeeeeeeee | sssssoossssssssss | 27061 | 27078 | 21 |
| 1263806 | CACTTTCATAATGCTGGC | eeeeeeeeeeeeeeeeee | sssssssoossssssss | 27061 | 27078 | 21 |
| 1263808 | CACTTTCATAATGCTGGC | eeeeeeeeeeeeeeeeee | sssssssssoossssss | 27061 | 27078 | 21 |
| 1263810 | CACTTTCATAATGCTGGC | eeeeeeeeeeeeeeeeee | sssssssssssoossss | 27061 | 27078 | 21 |
| 1263812 | CACTTTCATAATGCTGGC | eeeeeeeeeeeeeeeeee | sssssssssssssooss | 27061 | 27078 | 21 |
| 1210343 | CACTTTCATAATGCTGGC | eeeeeeeeeeeeeeeeee | ssosssssosssssoss | 27061 | 27078 | 21 |
| 1212825 | CACTTTCATAATGCTGGC | eeeeeeeeeeeeeeeeee | sssssssooosssssss | 27061 | 27078 | 21 |
| 1212817 | CACTTTCATAATGCTGGC | eeeeeeeeeeeeeeeeee | soossssssssssooss | 27061 | 27078 | 21 |
| 1212824 | CACTTTCATAATGCTGGC | eeeeeeeeeeeeeeeeee | sssssssoooossssss | 27061 | 27078 | 21 |
| 1212826 | CACTTTCATAATGCTGGC | eeeeeeeeeeeeeeeeee | ssoooosssssssssss | 27061 | 27078 | 21 |
| 1212827 | CACTTTCATAATGCTGGC | eeeeeeeeeeeeeeeeee | ssssoooosssssssss | 27061 | 27078 | 21 |
| 1212828 | CACTTTCATAATGCTGGC | eeeeeeeeeeeeeeeeee | ssssssoooosssssss | 27061 | 27078 | 21 |
| 1212829 | CACTTTCATAATGCTGGC | eeeeeeeeeeeeeeeeee | ssssssssoooosssss | 27061 | 27078 | 21 |
| 1212830 | CACTTTCATAATGCTGGC | eeeeeeeeeeeeeeeeee | ssssssssssoooosss | 27061 | 27078 | 21 |
| 1212831 | CACTTTCATAATGCTGGC | eeeeeeeeeeeeeeeeee | sssssssssssooooss | 27061 | 27078 | 21 |
| 1212818 | CACTTTCATAATGCTGGC | eeeeeeeeeeeeeeeeee | sooosssssssssooss | 27061 | 27078 | 21 |
| 1212823 | CACTTTCATAATGCTGGC | eeeeeeeeeeeeeeeeee | ssssssooooossssss | 27061 | 27078 | 21 |
| 1212819 | CACTTTCATAATGCTGGC | eeeeeeeeeeeeeeeeee | sooossssssssoooss | 27061 | 27078 | 21 |
| 1212822 | CACTTTCATAATGCTGGC | eeeeeeeeeeeeeeeeee | ssssssoooooosssss | 27061 | 27078 | 21 |
| 1212820 | CACTTTCATAATGCTGGC | eeeeeeeeeeeeeeeeee | soooosssssssoooss | 27061 | 27078 | 21 |
| 1212821 | CACTTTCATAATGCTGGC | eeeeeeeeeeeeeeeeee | sssssooooooosssss | 27061 | 27078 | 21 |
| 1287065 | TCACTTTCATAATGCTGGC | eeeeeeeeeeeeeeeeeee | ssssssssssssssssss | 27061 | 27079 | 30 |
| 1210341 | ACTTTCATAATGCTGG | eeeeeeeeeeeeeeee | sssssssssssssss | 27062 | 27077 | 31 |
| 524403 | CACTTTCATAATGCTGG | eeeeeeeeeeeeeeeee | ssssssssssssssss | 27062 | 27078 | 32 |
| 1287121 | TCACTTTCATAATGCTGG | eeeeeeeeeeeeeeeeee | ssssssssssssssoss | 27062 | 27079 | 23 |
| 1287120 | TCACTTTCATAATGCTGG | eeeeeeeeeeeeeeeeee | sssssssssssssosss | 27062 | 27079 | 23 |
| 1287113 | TCACTTTCATAATGCTGG | eeeeeeeeeeeeeeeeee | sssssssssssssooss | 27062 | 27079 | 23 |
| 1287110 | TCACTTTCATAATGCTGG | eeeeeeeeeeeeeeeeee | ssssssssssssososs | 27062 | 27079 | 23 |
| 1287119 | TCACTTTCATAATGCTGG | eeeeeeeeeeeeeeeeee | sssssssssssosssss | 27062 | 27079 | 23 |
| 1364782 | TCACTTTCATAATGCTGG | eeeeeeeeeeeeeeeeee | sssssssssssososss | 27062 | 27079 | 23 |
| 1364777 | TCACTTTCATAATGCTGG | eeeeeeeeeeeeeeeeee | ssssssssssossosss | 27062 | 27079 | 23 |
| 1287118 | TCACTTTCATAATGCTGG | eeeeeeeeeeeeeeeeee | sssssssssosssssss | 27062 | 27079 | 23 |
| 1364783 | TCACTTTCATAATGCTGG | eeeeeeeeeeeeeeeeee | sssssssssosssosss | 27062 | 27079 | 23 |
| 1287109 | TCACTTTCATAATGCTGG | eeeeeeeeeeeeeeeeee | ssssssssosssssoss | 27062 | 27079 | 23 |
| 1364784 | TCACTTTCATAATGCTGG | eeeeeeeeeeeeeeeeee | ssssssssossssosss | 27062 | 27079 | 23 |
| 1287117 | TCACTTTCATAATGCTGG | eeeeeeeeeeeeeeeeee | sssssssosssssssss | 27062 | 27079 | 23 |
| 1287112 | TCACTTTCATAATGCTGG | eeeeeeeeeeeeeeeeee | sssssssoossssssss | 27062 | 27079 | 23 |
| 1287116 | TCACTTTCATAATGCTGG | eeeeeeeeeeeeeeeeee | sssssosssssssssss | 27062 | 27079 | 23 |
| 1287115 | TCACTTTCATAATGCTGG | eeeeeeeeeeeeeeeeee | sssosssssssssssss | 27062 | 27079 | 23 |
| 1287114 | TCACTTTCATAATGCTGG | eeeeeeeeeeeeeeeeee | sosssssssssssssss | 27062 | 27079 | 23 |
| 1287106 | TCACTTTCATAATGCTGG | eeeeeeeeeeeeeeeeee | sossssssssssssoss | 27062 | 27079 | 23 |
| 1287107 | TCACTTTCATAATGCTGG | eeeeeeeeeeeeeeeeee | sossssssossssssss | 27062 | 27079 | 23 |
| 1287108 | TCACTTTCATAATGCTGG | eeeeeeeeeeeeeeeeee | sososssssssssssss | 27062 | 27079 | 23 |
| 1287111 | TCACTTTCATAATGCTGG | eeeeeeeeeeeeeeeeee | soossssssssssssss | 27062 | 27079 | 23 |
| 1287066 | TTCACTTTCATAATGCTGG | eeeeeeeeeeeeeeeeeee | ssssssssssssssssss | 27062 | 27080 | 33 |
| 1287074 | TTCACTTTCATAATGCTGG | eeeeeeeeeeeeeeeeeee | sssssssssssssssoss | 27062 | 27080 | 33 |
| 1287071 | TTCACTTTCATAATGCTGG | eeeeeeeeeeeeeeeeeee | sssssssssssssososs | 27062 | 27080 | 33 |
| 1287073 | TTCACTTTCATAATGCTGG | eeeeeeeeeeeeeeeeeee | ssssssssosssssssss | 27062 | 27080 | 33 |
| 1287070 | TTCACTTTCATAATGCTGG | eeeeeeeeeeeeeeeeeee | ssssssssossssssoss | 27062 | 27080 | 33 |
| 1287072 | TTCACTTTCATAATGCTGG | eeeeeeeeeeeeeeeeeee | sossssssssssssssss | 27062 | 27080 | 33 |
| 1287067 | TTCACTTTCATAATGCTGG | eeeeeeeeeeeeeeeeeee | sosssssssssssssoss | 27062 | 27080 | 33 |
| 1287068 | TTCACTTTCATAATGCTGG | eeeeeeeeeeeeeeeeeee | sossssssosssssssss | 27062 | 27080 | 33 |
| 1287069 | TTCACTTTCATAATGCTGG | eeeeeeeeeeeeeeeeeee | sosossssssssssssss | 27062 | 27080 | 33 |
| 1287060 | ATTCACTTTCATAATGCTGG | eeeeeeeeeeeeeeeeeeee | ssssssssssssssssoss | 27062 | 27081 | 20 |
| 1287057 | ATTCACTTTCATAATGCTGG | eeeeeeeeeeeeeeeeeeee | sssssssssssssssooss | 27062 | 27081 | 20 |
| 1287054 | ATTCACTTTCATAATGCTGG | eeeeeeeeeeeeeeeeeeee | ssssssssssssssososs | 27062 | 27081 | 20 |
| 1287059 | ATTCACTTTCATAATGCTGG | eeeeeeeeeeeeeeeeeeee | sssssssssosssssssss | 27062 | 27081 | 20 |
| 1287053 | ATTCACTTTCATAATGCTGG | eeeeeeeeeeeeeeeeeeee | sssssssssossssssoss | 27062 | 27081 | 20 |
| 1287056 | ATTCACTTTCATAATGCTGG | eeeeeeeeeeeeeeeeeeee | ssssssssoosssssssss | 27062 | 27081 | 20 |
| 1287058 | ATTCACTTTCATAATGCTGG | eeeeeeeeeeeeeeeeeeee | sosssssssssssssssss | 27062 | 27081 | 20 |
| 1287050 | ATTCACTTTCATAATGCTGG | eeeeeeeeeeeeeeeeeeee | sossssssssssssssoss | 27062 | 27081 | 20 |
| 1287051 | ATTCACTTTCATAATGCTGG | eeeeeeeeeeeeeeeeeeee | sosssssssosssssssss | 27062 | 27081 | 20 |
| 1287052 | ATTCACTTTCATAATGCTGG | eeeeeeeeeeeeeeeeeeee | sososssssssssssssss | 27062 | 27081 | 20 |
| 1287055 | ATTCACTTTCATAATGCTGG | eeeeeeeeeeeeeeeeeeee | soossssssssssssssss | 27062 | 27081 | 20 |
| 1287075 | ATTCACTTTCATAATGCTG | eeeeeeeeeeeeeeeeeee | ssssssssssssssssss | 27063 | 27081 | 34 |
| 1287062 | AGATTCACTTTCATAATGCT | eeeeeeeeeeeeeeeeeeee | sssssssssssssssssss | 27064 | 27083 | 35 |
| 1287061 | GATTCACTTTCATAATGCTG | eeeeeeeeeeeeeeeeeeee | sssssssssssssssssss | 27063 | 27082 | 49 |
| 1287076 | GATTCACTTTCATAATGCT | eeeeeeeeeeeeeeeeeee | ssssssssssssssssss | 27064 | 27082 | 50 |
| 1287701 | TCACTTTCATAATGCTGGT | eeeeeeeeeeeeeeeeeee | ssssssssssssssssss | 27062 | 27079 | 36 |
| 1287702 | TCACTTTCATAATGCTGGA | eeeeeeeeeeeeeeeeeee | ssssssssssssssssss | 27062 | 27079 | 37 |

### Table 3

[0321] The modified oligonucleotides in Table 3 below are 16, 17, 18, 19 or 20 nucleosides in length. Each nucleoside comprises a 2′-NMA sugar moiety. The sugar motif for each modified oligonucleotide is provided in the Sugar Motif column, wherein each ‘n’ represents a 2′-NMA sugar moiety. Each internucleoside linkage is either a phosphorothioate internucleoside linkage or a phosphodiester internucleoside linkage. The internucleoside linkage motif for each modified oligonucleotide is provided in the Internucleoside Linkage Motif column, wherein each ‘s’ represents a phosphorothioate internucleoside linkage, and each ‘o’ represents a phosphodiester internucleoside linkage. Each cytosine is a 5-methyl cytosine.

[0322] Each modified oligonucleotide listed in Table 3 below is 100% complementary to SEQ ID NO: 1 (GENBANK Accession No. NT_006713.14 truncated from nucleotides 19939708 to 19967777). “Start site” indicates the 5′-most nucleoside to which the modified oligonucleotide is complementary in the target nucleic acid sequence. “Stop site” indicates the 3′-most nucleoside to which the modified oligonucleotide is complementary in the target nucleic acid sequence.

TABLE 3
2′-NMA modified oligonucleotides with PS or mixed PS/PO internucleoside linkages

| | | | | SEQ | SEQ | |
|---|---|---|---|---|---|---|
| | | | | ID | ID | |
| | | | Internucleoside | No: 1 | No: 1 | SEQ |
| Compound | Nucleobase Sequence | Sugar Motif | Linkage Motif | Start | Stop | ID |
| Number | (5′ to 3′) | (5′ to 3′) | (5′ to 3′) | Site | Site | No. |
| 1287127 | CACTTTCATAATGCTGGCA | nnnnnnnnnnnnnnnnnnn | ssssssssssssssssss | 27060 | 27078 | 26 |
| 1287122 | TCACTTTCATAATGCTGGCA | nnnnnnnnnnnnnnnnnnnn | sssssssssssssssssss | 27060 | 27079 | 27 |
| 1212871 | CTTTCATAATGCTGGC | nnnnnnnnnnnnnnnn | sssssssssssssss | 27061 | 27076 | 28 |
| 1212869 | ACTTTCATAATGCTGGC | nnnnnnnnnnnnnnnnn | ssssssssssssssss | 27061 | 27077 | 29 |
| 1358996 | CACTTTCATAATGCTGGC | nnnnnnnnnnnnnnnnnn | sososssssssssssss | 27061 | 27078 | 21 |
| 1212873 | CACTTTCATAATGCTGGC | nnnnnnnnnnnnnnnnnn | ssosssssssssssoss | 27061 | 27078 | 21 |
| 1212874 | CACTTTCATAATGCTGGC | nnnnnnnnnnnnnnnnnn | ssosssssosssssoss | 27061 | 27078 | 21 |
| 1212875 | CACTTTCATAATGCTGGC | nnnnnnnnnnnnnnnnnn | ssosssosssosssoss | 27061 | 27078 | 21 |
| 1212879 | CACTTTCATAATGCTGGC | nnnnnnnnnnnnnnnnnn | soossssssssssooss | 27061 | 27078 | 21 |
| 1212880 | CACTTTCATAATGCTGGC | nnnnnnnnnnnnnnnnnn | sooosssssssssooss | 27061 | 27078 | 21 |
| 1212881 | CACTTTCATAATGCTGGC | nnnnnnnnnnnnnnnnnn | sooossssssssoooss | 27061 | 27078 | 21 |
| 1212885 | CACTTTCATAATGCTGGC | nnnnnnnnnnnnnnnnnn | ssssssooooossssss | 27061 | 27078 | 21 |
| 1212887 | CACTTTCATAATGCTGGC | nnnnnnnnnnnnnnnnnn | sssssssooosssssss | 27061 | 27078 | 21 |
| 1287128 | TCACTTTCATAATGCTGGC | nnnnnnnnnnnnnnnnnnn | ssssssssssssssssss | 27061 | 27079 | 30 |
| 1212870 | CACTTTCATAATGCTGG | nnnnnnnnnnnnnnnnn | ssssssssssssssss | 27062 | 27078 | 32 |
| 1287132 | TCACTTTCATAATGCTGG | nnnnnnnnnnnnnnnnnn | sossssssssssssoss | 27062 | 27079 | 23 |
| 1287133 | TCACTTTCATAATGCTGG | nnnnnnnnnnnnnnnnnn | ssssssssossssssss | 27062 | 27079 | 23 |
| 1332246 | TCACTTTCATAATGCTGG | nnnnnnnnnnnnnnnnnn | ssssssssosssssoss | 27062 | 27079 | 23 |
| 1332265 | TCACTTTCATAATGCTGG | nnnnnnnnnnnnnnnnnn | ssssssssssssososs | 27062 | 27079 | 23 |
| 1364778 | TCACTTTCATAATGCTGG | nnnnnnnnnnnnnnnnnn | sssssssssssososss | 27062 | 27079 | 23 |
| 1364779 | TCACTTTCATAATGCTGG | nnnnnnnnnnnnnnnnnn | ssssssssssossosss | 27062 | 27079 | 23 |
| 1364780 | TCACTTTCATAATGCTGG | nnnnnnnnnnnnnnnnnn | sssssssssosssosss | 27062 | 27079 | 23 |
| 1364781 | TCACTTTCATAATGCTGG | nnnnnnnnnnnnnnnnnn | ssssssssossssosss | 27062 | 27079 | 23 |
| 1287129 | TTCACTTTCATAATGCTGG | nnnnnnnnnnnnnnnnnnn | ssssssssssssssssss | 27062 | 27080 | 33 |
| 1287130 | TTCACTTTCATAATGCTGG | nnnnnnnnnnnnnnnnnnn | sosssssssssssssoss | 27062 | 27080 | 33 |
| 1287131 | TTCACTTTCATAATGCTGG | nnnnnnnnnnnnnnnnnnn | ssssssssosssssssss | 27062 | 27080 | 33 |
| 1332263 | TTCACTTTCATAATGCTGG | nnnnnnnnnnnnnnnnnnn | ssssssssossssssoss | 27062 | 27080 | 33 |
| 1332264 | TTCACTTTCATAATGCTGG | nnnnnnnnnnnnnnnnnnn | sssssssssssssssoss | 27062 | 27080 | 33 |
| 1332266 | TTCACTTTCATAATGCTGG | nnnnnnnnnnnnnnnnnnn | sssssssssssssososs | 27062 | 27080 | 33 |
| 1332270 | TTCACTTTCATAATGCTGG | nnnnnnnnnnnnnnnnnnn | ssssssssssssssooss | 27062 | 27080 | 33 |
| 1287124 | ATTCACTTTCATAATGCTGG | nnnnnnnnnnnnnnnnnnnn | sssssssssssssssssss | 27062 | 27081 | 20 |
| 1287125 | ATTCACTTTCATAATGCTGG | nnnnnnnnnnnnnnnnnnnn | sossssssssssssssoss | 27062 | 27081 | 20 |
| 1287126 | ATTCACTTTCATAATGCTGG | nnnnnnnnnnnnnnnnnnnn | sssssssssosssssssss | 27062 | 27081 | 20 |
| 1332267 | ATTCACTTTCATAATGCTGG | nnnnnnnnnnnnnnnnnnnn | ssssssssssssssssoss | 27062 | 27081 | 20 |
| 1332268 | ATTCACTTTCATAATGCTGG | nnnnnnnnnnnnnnnnnnnn | sssssssssssssssooss | 27062 | 27081 | 20 |
| 1332269 | ATTCACTTTCATAATGCTGG | nnnnnnnnnnnnnnnnnnnn | ssssssssssssssososs | 27062 | 27081 | 20 |
| 1332271 | ATTCACTTTCATAATGCTGG | nnnnnnnnnnnnnnnnnnnn | sssssssssossssssoss | 27062 | 27081 | 20 |
| 1287123 | TTCACTTTCATAATGCTGGC | nnnnnnnnnnnnnnnnnnnn | sssssssssssssssssss | 27061 | 27080 | 22 |

### Table 4

[0323] The modified oligonucleotides in Table 4 below are 18 or 19 nucleosides in length. Each nucleoside comprises either a 2′-MOE sugar moiety or a 2′-NMA sugar moiety. The sugar motif for each modified oligonucleotide is provided in the Sugar Motif column, wherein each ‘e’ represents a 2′-MOE sugar moiety, and each ‘n’ represents a 2′-NMA sugar moiety. Each internucleoside linkage is a phosphorothioate internucleoside linkage. The internucleoside linkage motif for each modified oligonucleotide is provided in the Internucleoside Linkage Motif column, wherein each ‘s’ represents a phosphorothioate internucleoside linkage. Each cytosine is a 5-methyl cytosine.

[0324] Each modified oligonucleotide listed in Table 4 below is 100% complementary to SEQ ID NO: 1 (GENBANK Accession No. NT_006713.14 truncated from nucleotides 19939708 to 19967777), unless specifically stated otherwise. Non-complementary nucleobases are specified in the Nucleobase Sequence column in underlined, bold, italicized font. “Start site” indicates the 5′-most nucleoside to which the modified oligonucleotide is complementary in the target nucleic acid sequence. “Stop site” indicates the 3′-most nucleoside to which the modified oligonucleotide is complementary in the target nucleic acid sequence.

TABLE 4
Mixed 2′-MOE/2′-NMA modified oligonucleotides with PS internucleoside linkages

| | | | | SEQ | SEQ | |
|---|---|---|---|---|---|---|
| | | | | ID | ID | |
| | | | Internucleoside | No: 1 | No: 1 | SEQ |
| Compound | Nucleobase Sequence | Sugar Motif | Linkage Motif | Start | Stop | ID |
| Number | (5′ to 3′) | (5′ to 3′) | (5′ to 3′) | Site | Site | No. |
| 1212931 | CACTTTCATAATGCTGGC | nennnnneneennnnnnn | sssssssssssssssss | 27061 | 27078 | 21 |
| 1212936 | CACTTTCATAATGCTGGC | nnnnnnnnnmmnenneen | sssssssssssssssss | 27061 | 27078 | 21 |
| 1212941 | CACTTTCATAATGCTGGC | nennnnneneenenneen | sssssssssssssssss | 27061 | 27078 | 21 |
| 1287728 | TCACTTTCATAATGCTGGC | nnnnnnnnnnnnnnnnnne | ssssssssssssssssss | 27061 | 27079 | 30 |
| 1287729 | TCACTTTCATAATGCTGGT | nnnnnnnnnnnnnnnnnne | ssssssssssssssssss | 27062 | 27079 | 36 |
| 1287730 | TCACTTTCATAATGCTGGA | nnnnnnnnnnnnnnnnnne | ssssssssssssssssss | 27062 | 27079 | 37 |

### Table 5

[0325] The modified oligonucleotides in Table 5 below are 16, 17, or 18 nucleosides in length. Each nucleoside comprises either a 2′-MOE sugar moiety or a cEt sugar moiety. The sugar motif for each modified oligonucleotide is provided in the Sugar Motif column, wherein each ‘e’ represents a 2′-MOE sugar moiety, and each ‘k’ represents a cEt sugar moiety. Each internucleoside linkage is a phosphorothioate internucleoside linkage. The internucleoside linkage motif for each modified oligonucleotide is provided in the Internucleoside Linkage Motif column, wherein each ‘s’ represents a phosphorothioate internucleoside linkage. Each cytosine is a 5-methyl cytosine.

[0326] Each modified oligonucleotide listed in Table 5 below is 100% complementary to SEQ ID NO: 1 (GENBANK Accession No. NT_006713.14 truncated from nucleotides 19939708 to 19967777). “Start site” indicates the 5′-most nucleoside to which the modified oligonucleotide is complementary in the target nucleic acid sequence. “Stop site” indicates the 3′-most nucleoside to which the modified oligonucleotide is complementary in the target nucleic acid sequence.

TABLE 5
Mixed 2′-MOE/cEt modified oligonucleotides with PS internucleoside linkages

| | | | | SEQ | SEQ | |
|---|---|---|---|---|---|---|
| | | | | ID | ID | |
| | | | Internucleoside | No: 1 | No: 1 | SEQ |
| Compound | Nucleobase Sequence | Sugar Motif | Linkage Motif | Start | Stop | ID |
| Number | (5′ to 3′) | (5′ to 3′) | (5′ to 3′) | Site | Site | No. |
| 1212961 | CACTTTCATAATGCTGGC | keekeekeekeekeeeek | sssssssssssssssss | 27061 | 27078 | 21 |
| 1212962 | CACTTTCATAATGCTGGC | keeekeeekeeekeeeek | sssssssssssssssss | 27061 | 27078 | 21 |
| 1212963 | CACTTTCATAATGCTGGC | keeeeekeeeeekeeeek | sssssssssssssssss | 27061 | 27078 | 21 |
| 1212964 | CACTTTCATAATGCTGGC | keeeeeeekeeeeeeeek | sssssssssssssssss | 27061 | 27078 | 21 |
| 1212965 | CACTTTCATAATGCTGGC | keeeeeeeeeeeeeeeek | sssssssssssssssss | 27061 | 27078 | 21 |
| 1212966 | CACTTTCATAATGCTGGC | eeekeekeekeekeekek | sssssssssssssssss | 27061 | 27078 | 21 |
| 1212967 | CACTTTCATAATGCTGGC | eeekeekeekeekeekee | sssssssssssssssss | 27061 | 27078 | 21 |
| 1212968 | CACTTTCATAATGCTGGC | eeeeeekeekeekeekee | sssssssssssssssss | 27061 | 27078 | 21 |
| 1212969 | CACTTTCATAATGCTGGC | eeeeeekeekeekeeeee | sssssssssssssssss | 27061 | 27078 | 21 |
| 1212970 | CACTTTCATAATGCTGGC | eeeeeekeeeeekeeeee | sssssssssssssssss | 27061 | 27078 | 21 |
| 1212971 | CACTTTCATAATGCTGGC | keekeekeekeeeeeeee | sssssssssssssssss | 27061 | 27078 | 21 |
| 1212972 | CACTTTCATAATGCTGGC | eeeeeeeekeekeekeek | sssssssssssssssss | 27061 | 27078 | 21 |
| 1212973 | CACTTTCATAATGCTGGC | keekeekeeeeeeeeeee | sssssssssssssssss | 27061 | 27078 | 21 |
| 1212974 | CACTTTCATAATGCTGGC | eeeeeeeeeeekeekeek | sssssssssssssssss | 27061 | 27078 | 21 |
| 1212975 | CACTTTCATAATGCTGGC | keekeeeeeeeeeeeeee | sssssssssssssssss | 27061 | 27078 | 21 |
| 1212976 | CACTTTCATAATGCTGGC | eeeeeeeeeeeeeekeek | sssssssssssssssss | 27061 | 27078 | 21 |
| 1212977 | ACTTTCATAATGCTGGC | keekeekeekeekeeek | ssssssssssssssss | 27061 | 27077 | 29 |
| 1212978 | ACTTTCATAATGCTGGC | keeekeeekeeekeeek | ssssssssssssssss | 27061 | 27077 | 29 |
| 1212979 | ACTTTCATAATGCTGGC | keeeekeeeeekeeeek | ssssssssssssssss | 27061 | 27077 | 29 |
| 1212980 | ACTTTCATAATGCTGGC | keeeeeeekeeeeeeek | ssssssssssssssss | 27061 | 27077 | 29 |
| 1212981 | ACTTTCATAATGCTGGC | keeeeeeeeeeeeeeek | ssssssssssssssss | 27061 | 27077 | 29 |
| 1212982 | ACTTTCATAATGCTGGC | eekeekeekeekeekek | ssssssssssssssss | 27061 | 27077 | 29 |
| 1212983 | ACTTTCATAATGCTGGC | eekeekeekeekeekee | ssssssssssssssss | 27061 | 27077 | 29 |
| 1212984 | ACTTTCATAATGCTGGC | eeeeekeekeekeekee | ssssssssssssssss | 27061 | 27077 | 29 |
| 1212985 | ACTTTCATAATGCTGGC | eeeeekeekeekeeeee | ssssssssssssssss | 27061 | 27077 | 29 |
| 1212986 | ACTTTCATAATGCTGGC | eeeeekeeeeekeeeee | ssssssssssssssss | 27061 | 27077 | 29 |
| 1212987 | ACTTTCATAATGCTGGC | keekeekeekeeeeeee | ssssssssssssssss | 27061 | 27077 | 29 |
| 1212988 | ACTTTCATAATGCTGGC | eeeeeeekeekeekeek | ssssssssssssssss | 27061 | 27077 | 29 |
| 1212989 | ACTTTCATAATGCTGGC | keekeekeeeeeeeeee | ssssssssssssssss | 27061 | 27077 | 29 |
| 1212990 | ACTTTCATAATGCTGGC | eeeeeeeeeekeekeek | ssssssssssssssss | 27061 | 27077 | 29 |
| 1212991 | ACTTTCATAATGCTGGC | keekeeeeeeeeeeeee | ssssssssssssssss | 27061 | 27077 | 29 |
| 1212992 | ACTTTCATAATGCTGGC | eeeeeeeeeeeeekeek | ssssssssssssssss | 27061 | 27077 | 29 |
| 1212993 | CTTTCATAATGCTGGC | keekeekeekeekeek | sssssssssssssss | 27061 | 27076 | 28 |
| 1212994 | CTTTCATAATGCTGGC | keeekeeekeeekeek | sssssssssssssss | 27061 | 27076 | 28 |
| 1212995 | CTTTCATAATGCTGGC | keeeekeeeekeeeek | sssssssssssssss | 27061 | 27076 | 28 |
| 1212996 | CTTTCATAATGCTGGC | keeeeeeekeeeeeek | sssssssssssssss | 27061 | 27076 | 28 |
| 1212997 | CTTTCATAATGCTGGC | keeeeeeeeeeeeeek | sssssssssssssss | 27061 | 27076 | 28 |
| 1212998 | CTTTCATAATGCTGGC | kekeekeekeekeeke | sssssssssssssss | 27061 | 27076 | 28 |
| 1212999 | CTTTCATAATGCTGGC | eekeekeekeekeeke | sssssssssssssss | 27061 | 27076 | 28 |
| 1213000 | CTTTCATAATGCTGGC | eeeeekeekeekeeke | sssssssssssssss | 27061 | 27076 | 28 |
| 1213001 | CTTTCATAATGCTGGC | eeeeekeekeekeeee | sssssssssssssss | 27061 | 27076 | 28 |
| 1213002 | CTTTCATAATGCTGGC | eeeeekeeeeekeeee | sssssssssssssss | 27061 | 27076 | 28 |
| 1213003 | CTTTCATAATGCTGGC | keekeekeekeeeeee | sssssssssssssss | 27061 | 27076 | 28 |
| 1213004 | CTTTCATAATGCTGGC | eeeeeekeekeekeek | sssssssssssssss | 27061 | 27076 | 28 |
| 1213005 | CTTTCATAATGCTGGC | keekeekeeeeeeeee | sssssssssssssss | 27061 | 27076 | 28 |
| 1213006 | CTTTCATAATGCTGGC | eeeeeeeeekeekeek | sssssssssssssss | 27061 | 27076 | 28 |
| 1213007 | CTTTCATAATGCTGGC | keekeeeeeeeeeeee | sssssssssssssss | 27061 | 27076 | 28 |
| 1213008 | CTTTCATAATGCTGGC | eeeeeeeeeeeekeek | sssssssssssssss | 27061 | 27076 | 28 |

### Table 6

[0327] The modified oligonucleotides in Table 6 below are 19 or 20 nucleosides in length. Each nucleoside comprises a 2′-MOE sugar moiety, a 2′-NMA sugar moiety, a 2′-OMe sugar moiety, or a 2′--D-deoxyribosyl sugar moiety. The sugar motif for each modified oligonucleotide is provided in the Sugar Motif column, wherein each ‘e’ represents a 2′-MOE sugar moiety, each ‘n’ represents a 2′-NMA sugar moiety, each ‘y’ represents a 2′-OMe sugar moiety, and each ‘d’ represents a 2′-β-D-deoxyribosyl sugar moiety. Each internucleoside linkage is either a phosphorothioate internucleoside linkage or a phosphodiester internucleoside linkage. The internucleoside linkage motif for each modified oligonucleotide, provided in the Internucleoside Linkage Motif column, is (from 5′ to 3′): ssssssssssssssssso; wherein each ‘s’ represents a phosphorothioate internucleoside linkage, and each ‘o’ represents a phosphodiester internucleoside linkage. Cytosines are either non-methylated cytosines or 5-methyl cytosines, wherein each lowercase ‘c’ in the Nucleobase Sequence column represents a non-methylated cytosine, and each uppercase ‘C’ in the Nucleobase Sequence column represents a 5-methyl cytosine.

[0328] Each nucleobase in the modified oligonucleotides listed in Table 6 below is complementary to SEQ ID NO: 1 (GENBANK Accession No. NT_006713.14 truncated from nucleotides 19939708 to 19967777), unless specifically stated otherwise. Non-complementary nucleobases are specified in the Nucleobase Sequence column in underlined, bold, italicized font. “Start site” indicates the 5′-most nucleoside to which the modified oligonucleotide is complementary in the target nucleic acid sequence. “Stop site” indicates the 3′-most nucleoside to which the modified oligonucleotide is complementary in the target nucleic acid sequence.

TABLE 6
Modified oligonucleotides with mixed PS/PO internucleoside linkages

| | | | | SEQ | SEQ | |
|---|---|---|---|---|---|---|
| | | | | ID | ID | |
| | | | Internucleoside | No: 1 | No: 1 | SEQ |
| Compound | Nucleobase Sequence | Sugar Motif | Linkage Motif | Start | Stop | ID |
| Number | (5′ to 3′) | (5′ to 3′) | (5′ to 3′) | Site | Site | No. |
| 1287707 | TCACTTTCATAATGCTGGC | eeeeeeeeeeeeeeeeeed | ssssssssssssssssso | 27061 | 27079 | 30 |
| 1287708 | TCACTTTCATAATGCTGGc | eeeeeeeeeeeeeeeeeed | ssssssssssssssssso | 27061 | 27079 | 30 |
| 1287709 | TCACTTTCATAATGCTGGT | eeeeeeeeeeeeeeeeeed | ssssssssssssssssso | 27062 | 27079 | 36 |
| 1287710 | TCACTTTCATAATGCTGGA | eeeeeeeeeeeeeeeeeed | ssssssssssssssssso | 27062 | 27079 | 37 |
| 1287711 | TCACTTTCATAATGCTGGc | eeeeeeeeeeeeeeeeeey | ssssssssssssssssso | 27061 | 27079 | 30 |
| 1287712 | TCACTTTCATAATGCTGGU | eeeeeeeeeeeeeeeeeey | ssssssssssssssssso | 27062 | 27079 | 38 |
| 1287713 | TCACTTTCATAATGCTGGA | eeeeeeeeeeeeeeeeeey | ssssssssssssssssso | 27062 | 27079 | 37 |
| 1287731 | TCACTTTCATAATGCTGGC | nnnnnnnnnnnnnnnnnne | ssssssssssssssssso | 27061 | 27079 | 30 |
| 1287732 | TCACTTTCATAATGCTGGc | nnnnnnnnnnnnnnnnnne | ssssssssssssssssso | 27061 | 27079 | 30 |
| 1287733 | TCACTTTCATAATGCTGGT | nnnnnnnnnnnnnnnnnne | ssssssssssssssssso | 27062 | 27079 | 36 |
| 1287734 | TCACTTTCATAATGCTGGA | nnnnnnnnnnnnnnnnnne | ssssssssssssssssso | 27062 | 27079 | 37 |
| 1287735 | TCACTTTCATAATGCTGGC | nnnnnnnnnnnnnnnnnnd | ssssssssssssssssso | 27061 | 27079 | 30 |
| 1287736 | TCACTTTCATAATGCTGGc | nnnnnnnnnnnnnnnnnnd | ssssssssssssssssso | 27061 | 27079 | 30 |
| 1287737 | TCACTTTCATAATGCTGGT | nnnnnnnnnnnnnnnnnnd | ssssssssssssssssso | 27062 | 27079 | 36 |
| 1287738 | TCACTTTCATAATGCTGGA | nnnnnnnnnnnnnnnnnnd | ssssssssssssssssso | 27062 | 27079 | 37 |
| 1287739 | TCACTTTCATAATGCTGGc | nnnnnnnnnnnnnnnnnny | ssssssssssssssssso | 27061 | 27079 | 30 |
| 1287740 | TCACTTTCATAATGCTGGU | nnnnnnnnnnnnnnnnnny | ssssssssssssssssso | 27062 | 27079 | 38 |
| 1287741 | TCACTTTCATAATGCTGGA | nnnnnnnnnnnnnnnnnny | ssssssssssssssssso | 27062 | 27079 | 37 |
| 1287705 | TCACTTTCATAATGCTGGT | eeeeeeeeeeeeeeeeeee | ssssssssssssssssso | 27062 | 27079 | 36 |
| 1287706 | TCACTTTCATAATGCTGGA | eeeeeeeeeeeeeeeeeee | ssssssssssssssssso | 27062 | 27079 | 37 |
| 1287704 | TCACTTTCATAATGCTGGc | eeeeeeeeeeeeeeeeeee | ssssssssssssssssso | 27061 | 27079 | 30 |
| 1287703 | TCACTTTCATAATGCTGGC | eeeeeeeeeeeeeeeeeee | ssssssssssssssssso | 27061 | 27079 | 30 |

### Table 7

[0329] The modified oligonucleotides in Table 7 below are 19 or 20 nucleosides in length. Each nucleoside comprises a 2′-MOE sugar moiety, a 2′-NMA sugar moiety, or a 2′-β-D-deoxyribosyl sugar moiety. The sugar motif for each modified oligonucleotide is provided in the Sugar Motif column, wherein each ‘e’ represents a 2′-MOE sugar moiety, each ‘n’ represents a 2′-NMA sugar moiety, and each ‘d’ represents a 2′-β-D-deoxyribosyl sugar moiety. Each internucleoside linkage is either a phosphorothioate internucleoside linkage or a phosphodiester internucleoside linkage. The internucleoside linkage motif for each modified oligonucleotide, provided in the Internucleoside Linkage Motif column, is (from 5′ to 3′): sssssssssssssssssoo; wherein each ‘s’ represents a phosphorothioate internucleoside linkage, and each ‘o’ represents a phosphodiester internucleoside linkage. Each cytosine is a 5-methyl cytosine. Each nucleobase in the modified oligonucleotide listed in Table 6 below is complementary to SEQ ID NO: 1 (GENBANK Accession No. NT_006713.14 truncated from nucleotides 19939708 to 19967777), unless specifically stated otherwise. Non-complementary nucleobases are specified in the Nucleobase Sequence column in underlined, bold, italicized font. “Start site” indicates the 5′-most nucleoside to which the modified oligonucleotide is complementary in the target nucleic acid sequence. “Stop site” indicates the 3′-most nucleoside to which the modified oligonucleotide is complementary in the target nucleic acid sequence.

TABLE 7
Modified oligonucleotides with mixed PS/PO internucleoside linkages

| | | | | SEQ | SEQ | |
|---|---|---|---|---|---|---|
| | | | | ID | ID | |
| | | | Internucleoside | No: 1 | No: 1 | SEQ |
| Compound | Nucleobase Sequence | Sugar Motif | Linkage Motif | Start | Stop | ID |
| Number | (5 to 3′) | (5′ to 3′) | (5′ to 3′) | Site | Site | No. |
| 1318749 | TCACTTTCATAATGCTGGAA | nnnnnnnnnnnnnnnnnndd | sssssssssssssssssoo | 27062 | 27079 | 39 |
| 1318750 | TCACTTTCATAATGCTGGCA | nnnnnnnnnnnnnnnnnned | sssssssssssssssssoo | 27060 | 27079 | 27 |
| 1318751 | TCACTTTCATAATGCTGGCA | nnnnnnnnnnnnnnnnnndd | sssssssssssssssssoo | 27060 | 27079 | 27 |
| 1318752 | TCACTTTCATAATGCTGGAA | nnnnnnnnnnnnnnnnnned | sssssssssssssssssoo | 27062 | 27079 | 39 |
| 1318753 | TCACTTTCATAATGCTGGAA | nnnnnnnnnnnnnnnnnnde | sssssssssssssssssoo | 27062 | 27079 | 39 |
| 1318754 | TCACTTTCATAATGCTGGCA | nnnnnnnnnnnnnnnnnnde | sssssssssssssssssoo | 27060 | 27079 | 27 |
| 1318755 | TCACTTTCATAATGCTGGAA | nnnnnnnnnnnnnnnnnnee | sssssssssssssssssoo | 27062 | 27079 | 39 |
| 1318756 | TCACTTTCATAATGCTGGCA | nnnnnnnnnnnnnnnnnnee | sssssssssssssssssoo | 27060 | 27079 | 27 |
| 1318757 | TCACTTTCATAATGCTGGAT | eeeeeeeeeeeeeeeeeedd | sssssssssssssssssoo | 27062 | 27079 | 40 |
| 1318758 | TCACTTTCATAATGCTGGAC | eeeeeeeeeeeeeeeeeedd | sssssssssssssssssoo | 27062 | 27079 | 41 |
| 1318759 | TCACTTTCATAATGCTGGTC | eeeeeeeeeeeeeeeeeedd | sssssssssssssssssoo | 27062 | 27079 | 42 |
| 1318760 | TCACTTTCATAATGCTGGAA | eeeeeeeeeeeeeeeeeedd | sssssssssssssssssoo | 27062 | 27079 | 39 |
| 1318761 | TCACTTTCATAATGCTGGTT | eeeeeeeeeeeeeeeeeedd | sssssssssssssssssoo | 27062 | 27079 | 43 |
| 1318762 | TCACTTTCATAATGCTGGTA | eeeeeeeeeeeeeeeeeedd | sssssssssssssssssoo | 27062 | 27079 | 44 |
| 1318763 | TCACTTTCATAATGCTGGCC | eeeeeeeeeeeeeeeeeedd | sssssssssssssssssoo | 27061 | 27079 | 45 |
| 1318764 | TCACTTTCATAATGCTGGAA | eeeeeeeeeeeeeeeeeeed | sssssssssssssssssoo | 27062 | 27079 | 39 |
| 1318765 | TCACTTTCATAATGCTGGAC | eeeeeeeeeeeeeeeeeede | sssssssssssssssssoo | 27062 | 27079 | 41 |
| 1318766 | TCACTTTCATAATGCTGGCT | eeeeeeeeeeeeeeeeeedd | sssssssssssssssssoo | 27061 | 27079 | 46 |
| 1318767 | TCACTTTCATAATGCTGGTT | eeeeeeeeeeeeeeeeeede | sssssssssssssssssoo | 27062 | 27079 | 43 |
| 1318768 | TCACTTTCATAATGCTGGCA | eeeeeeeeeeeeeeeeeedd | sssssssssssssssssoo | 27060 | 27079 | 27 |
| 1318769 | TCACTTTCATAATGCTGGCA | eeeeeeeeeeeeeeeeeeed | sssssssssssssssssoo | 27060 | 27079 | 27 |
| 1318770 | TCACTTTCATAATGCTGGAT | eeeeeeeeeeeeeeeeeede | sssssssssssssssssoo | 27062 | 27079 | 40 |
| 1318771 | TCACTTTCATAATGCTGGTA | eeeeeeeeeeeeeeeeeede | sssssssssssssssssoo | 27062 | 27079 | 44 |
| 1318772 | TCACTTTCATAATGCTGGAA | eeeeeeeeeeeeeeeeeede | sssssssssssssssssoo | 27062 | 27079 | 39 |
| 1318773 | TCACTTTCATAATGCTGGTC | eeeeeeeeeeeeeeeeeede | sssssssssssssssssoo | 27062 | 27079 | 42 |
| 1318774 | TCACTTTCATAATGCTGGCC | eeeeeeeeeeeeeeeeeede | sssssssssssssssssoo | 27061 | 27079 | 45 |
| 1318775 | TCACTTTCATAATGCTGGCT | eeeeeeeeeeeeeeeeeede | sssssssssssssssssoo | 27061 | 27079 | 46 |
| 1318776 | TCACTTTCATAATGCTGGCA | eeeeeeeeeeeeeeeeeede | sssssssssssssssssoo | 27060 | 27079 | 27 |
| 1333508 | TCACTTTCATAATGCTGGCT | nnnnnnnnnnnnnnnnnnee | sssssssssssssssssoo | 27061 | 27079 | 46 |
| 1318777 | TCACTTTCATAATGCTGGAC | eeeeeeeeeeeeeeeeeeee | sssssssssssssssssoo | 27062 | 27079 | 41 |
| 1318778 | TCACTTTCATAATGCTGGTT | eeeeeeeeeeeeeeeeeeee | sssssssssssssssssoo | 27062 | 27079 | 43 |
| 1318779 | TCACTTTCATAATGCTGGAA | eeeeeeeeeeeeeeeeeeee | sssssssssssssssssoo | 27062 | 27079 | 39 |
| 1318780 | TCACTTTCATAATGCTGGTC | eeeeeeeeeeeeeeeeeeee | sssssssssssssssssoo | 27062 | 27079 | 42 |
| 1318781 | TCACTTTCATAATGCTGGAT | eeeeeeeeeeeeeeeeeeee | sssssssssssssssssoo | 27062 | 27079 | 40 |
| 1318782 | TCACTTTCATAATGCTGGCT | eeeeeeeeeeeeeeeeeeee | sssssssssssssssssoo | 27061 | 27079 | 46 |
| 1318783 | TCACTTTCATAATGCTGGTA | eeeeeeeeeeeeeeeeeeee | sssssssssssssssssoo | 27062 | 27079 | 44 |
| 1318784 | TCACTTTCATAATGCTGGCC | eeeeeeeeeeeeeeeeeeee | sssssssssssssssssoo | 27061 | 27079 | 45 |
| 1318748 | TCACTTTCATAATGCTGGCA | eeeeeeeeeeeeeeeeeeee | sssssssssssssssssoo | 27060 | 27079 | 27 |

### Table 8

[0330] The modified oligonucleotides in Table 8 below are each 19 nucleosides in length. Each nucleoside comprises a 2′-MOE sugar moiety, a 2′-NMA sugar moiety, or a 2′-β-D-deoxyribosyl sugar moiety. The sugar motif for each modified oligonucleotide is provided in the Sugar Motif column, wherein each ‘e’ represents a 2′-MOE sugar moiety, each ‘n’ represents a 2′-NMA sugar moiety, and each ‘d’ represents a 2′-β-D-deoxyribosyl sugar moiety. Each internucleoside linkage is either a phosphorothioate internucleoside linkage or a phosphodiester internucleoside linkage. The internucleoside linkage motif for each modified oligonucleotide, provided in the Internucleoside Linkage Motif column, is (from 5′ to 3′): ssssssssssssososso; wherein each ‘s’ represents a phosphorothioate internucleoside linkage, and each ‘o’ represents a phosphodiester internucleoside linkage. Each cytosine is a 5-methyl cytosine. Each nucleobase in the modified oligonucleotide listed in Table 8 below is complementary to SEQ ID NO: 1 (GENBANK Accession No. NT_006713.14 truncated from nucleotides 19939708 to 19967777), unless specifically stated otherwise. Non-complementary nucleobases are specified in the Nucleobase Sequence column in underlined, bold, italicized font. “Start site” indicates the 5′-most nucleoside to which the modified oligonucleotide is complementary in the target nucleic acid sequence. “Stop site” indicates the 3′-most nucleoside to which the modified oligonucleotide is complementary in the target nucleic acid sequence.

TABLE 8
Modified oligonucleotides with mixed PS/PO internucleoside linkages

| | | | | SEQ | SEQ | |
|---|---|---|---|---|---|---|
| | | | | ID | ID | |
| | | | Internucleoside | No: 1 | No: 1 | SEQ |
| Compound | Nucleobase Sequence | Sugar Motif | Linkage Motif | Start | Stop | ID |
| Number | (5′ to 3′) | (5′ to 3′) | (5′ to 3′) | Site | Site | No. |
| 1332247 | TCACTTTCATAATGCTGGC | nnnnnnnnnnnnnnnnnnd | ssssssssssssososso | 27061 | 27079 | 30 |
| 1332248 | TCACTTTCATAATGCTGGA | nnnnnnnnnnnnnnnnnnd | ssssssssssssososso | 27062 | 27079 | 37 |
| 1332249 | TCACTTTCATAATGCTGGA | nnnnnnnnnnnnnnnnnne | ssssssssssssososso | 27062 | 27079 | 37 |
| 1332251 | TCACTTTCATAATGCTGGC | nnnnnnnnnnnnnnnnnne | ssssssssssssososso | 27061 | 27079 | 30 |
| 1332255 | TCACTTTCATAATGCTGGC | eeeeeeeeeeeeeeeeeed | ssssssssssssososso | 27061 | 27079 | 30 |
| 1332257 | TCACTTTCATAATGCTGGA | eeeeeeeeeeeeeeeeeed | ssssssssssssososso | 27062 | 27079 | 37 |
| 1332256 | TCACTTTCATAATGCTGGA | eeeeeeeeeeeeeeeeeee | ssssssssssssososso | 27062 | 27079 | 37 |
| 1332258 | TCACTTTCATAATGCTGGC | eeeeeeeeeeeeeeeeeee | ssssssssssssososso | 27061 | 27079 | 30 |

### Table 9

[0331] The modified oligonucleotides in Table 9 below are each 19 nucleosides in length. Each nucleoside comprises a 2′-MOE sugar moiety, a 2′-NMA sugar moiety, or a 2′-β-D-deoxyribosyl sugar moiety. The sugar motif for each modified oligonucleotide is provided in the Sugar Motif column, wherein each ‘e’ represents a 2′-MOE sugar moiety, each ‘n’ represents a 2′-NMA sugar moiety, and each ‘d’ represents a 2′-β-D-deoxyribosyl sugar moiety. Each internucleoside linkage is either a phosphorothioate internucleoside linkage or a phosphodiester internucleoside linkage. The internucleoside linkage motif for each modified oligonucleotide, provided in the Internucleoside Linkage Motif column, is (from 5′ to 3′): ssssssssssssssosso; wherein each ‘s’ represents a phosphorothioate internucleoside linkage, and each ‘o’ represents a phosphodiester internucleoside linkage. Each cytosine is a 5-methyl cytosine. Each nucleobase in the modified oligonucleotide listed in Table 9 below is complementary to SEQ ID NO: 1 (GENBANK Accession No. NT_006713.14 truncated from nucleotides 19939708 to 19967777), unless specifically stated otherwise. Non-complementary nucleobases are specified in the Nucleobase Sequence column in underlined, bold, italicized font. “Start site” indicates the 5′-most nucleoside to which the modified oligonucleotide is complementary in the target nucleic acid sequence. “Stop site” indicates the 3′-most nucleoside to which the modified oligonucleotide is complementary in the target nucleic acid sequence.

TABLE 9
Modified oligonucleotides with mixed PS/PO internucleoside linkages

| | | | | SEQ | SEQ | |
|---|---|---|---|---|---|---|
| | | | | ID | ID | |
| | | | Internucleoside | No: 1 | No: 1 | SEQ |
| Compound | Nucleobase Sequence | Sugar Motif | Linkage Motif | Start | Stop | ID |
| Number | (5′ to 3′) | (5′ to 3′) | (5′ to 3′) | Site | Site | No. |
| 1332250 | TCACTTTCATAATGCTGGA | nnnnnnnnnnnnnnnnnnd | ssssssssssssssosso | 27062 | 27079 | 37 |
| 1332252 | TCACTTTCATAATGCTGGC | nnnnnnnnnnnnnnnnnnd | ssssssssssssssosso | 27061 | 27079 | 30 |
| 1332253 | TCACTTTCATAATGCTGGA | nnnnnnnnnnnnnnnnnne | ssssssssssssssosso | 27062 | 27079 | 37 |
| 1332254 | TCACTTTCATAATGCTGGC | nnnnnnnnnnnnnnnnnne | ssssssssssssssosso | 27061 | 27079 | 30 |
| 1332259 | TCACTTTCATAATGCTGGA | eeeeeeeeeeeeeeeeeed | ssssssssssssssosso | 27062 | 27079 | 37 |
| 1332260 | TCACTTTCATAATGCTGGC | eeeeeeeeeeeeeeeeeed | ssssssssssssssosso | 27061 | 27079 | 30 |
| 1332261 | TCACTTTCATAATGCTGGA | eeeeeeeeeeeeeeeeeee | ssssssssssssssosso | 27062 | 27079 | 37 |
| 1332262 | TCACTTTCATAATGCTGGC | eeeeeeeeeeeeeeeeeee | ssssssssssssssosso | 27061 | 27079 | 30 |

### Table 10

[0332] The modified oligonucleotides in Table 10 below are each 19 nucleosides in length. Each nucleoside comprises a 2′-MOE sugar moiety or a 2′-NMA sugar moiety. The sugar motif for each modified oligonucleotide is provided in the Sugar Motif column, wherein each ‘e’ represents a 2′-MOE sugar moiety, and each ‘n’ represents a 2′-NMA sugar moiety. Each internucleoside linkage is either a phosphorothioate internucleoside linkage or a phosphodiester internucleoside linkage. The internucleoside linkage motif for each modified oligonucleotide, provided in the Internucleoside Linkage Motif column, is (from 5′ to 3′): osssssssssssssssss; wherein each ‘s’ represents a phosphorothioate internucleoside linkage, and each ‘o’ represents a phosphodiester internucleoside linkage. Each cytosine is a 5-methyl cytosine.

[0333] Each nucleobase in the modified oligonucleotide listed in Table 10 below is complementary to SEQ ID NO: 1 (GENBANK Accession No. NT_006713.14 truncated from nucleotides 19939708 to 19967777), unless specifically stated otherwise. Non-complementary nucleobases are specified in the Nucleobase Sequence column in underlined, bold, italicized font. “Start site” indicates the 5′-most nucleoside to which the modified oligonucleotide is complementary in the target nucleic acid sequence. “Stop site” indicates the 3′-most nucleoside to which the modified oligonucleotide is complementary in the target nucleic acid sequence.

TABLE 10
Modified oligonucleotides with mixed PS/PO internucleoside linkages

| | | | | SEQ | SEQ | |
|---|---|---|---|---|---|---|
| | | | | ID | ID | |
| | | | Internucleoside | No: 1 | No: 1 | SEQ |
| Compound | Nucleobase Sequence | Sugar Motif | Linkage Motif | Start | Stop | ID |
| Number | (5′ to 3′) | (5′ to 3′) | (5′ to 3′) | Site | Site | No. |
| 1287742 | CTCACTTTCATAATGCTGG | ennnnnnnnnnnnnnnnnn | osssssssssssssssss | 27062 | 27079 | 47 |
| 1287743 | TTCACTTTCATAATGCTGG | ennnnnnnnnnnnnnnnnn | osssssssssssssssss | 27062 | 27080 | 33 |
| 1287744 | ATCACTTTCATAATGCTGG | ennnnnnnnnnnnnnnnnn | osssssssssssssssss | 27062 | 27079 | 48 |
| 1287714 | CTCACTTTCATAATGCTGG | eeeeeeeeeeeeeeeeeee | osssssssssssssssss | 27062 | 27079 | 47 |
| 1287716 | ATCACTTTCATAATGCTGG | eeeeeeeeeeeeeeeeeee | osssssssssssssssss | 27062 | 27079 | 48 |
| 1287715 | TTCACTTTCATAATGCTGG | eeeeeeeeeeeeeeeeeee | osssssssssssssssss | 27062 | 27080 | 33 |

### Table 11

[0334] The modified oligonucleotides in Table 11 below are each 20 nucleosides in length. Each nucleoside comprises a 2′-MOE sugar moiety or a 2′-NMA sugar moiety. The sugar motif for each modified oligonucleotide is provided in the Sugar Motif column, wherein each ‘e’ represents a 2′-MOE sugar moiety, and each ‘n’ represents a 2′-NMA sugar moiety. Each internucleoside linkage is either a phosphorothioate internucleoside linkage or a phosphodiester internucleoside linkage. The internucleoside linkage motif for each modified oligonucleotide, provided in the Internucleoside Linkage Motif column, is (from 5′ to 3′): ossssssssssssssssso; wherein each ‘s’ represents a phosphorothioate internucleoside linkage, and each ‘o’ represents a phosphodiester internucleoside linkage. Each cytosine is a 5-methyl cytosine.

[0335] Each modified oligonucleotide listed in Table 11 below is 100% complementary to SEQ ID NO: 1 (GENBANK Accession No. NT_006713.14 truncated from nucleotides 19939708 to 19967777). “Start site” indicates the 5′-most nucleoside to which the modified oligonucleotide is complementary in the target nucleic acid sequence. “Stop site” indicates the 3′-most nucleoside to which the modified oligonucleotide is complementary in the target nucleic acid sequence.

TABLE 11
Modified oligonucleotides with mixed PS/PO internucleoside linkages

| | | | | SEQ | SEQ | |
|---|---|---|---|---|---|---|
| | | | Internucleoside | ID No: | ID No: | SEQ |
| Compound | Nucleobase Sequence | Sugar Motif | Linkage Motif | 1 Start | 1 Stop | ID |
| Number | (5′ to 3′) | (5′ to 3′) | (5′ to 3′) | Site | Site | No. |
| 1287745 | TTCACTTTCATAATGCTGGC | ennnnnnnnnnnnnnnnnne | ossssssssssssssssso | 27061 | 27080 | 22 |
| 1287717 | TTCACTTTCATAATGCTGGC | eeeeeeeeeeeeeeeeeeee | ossssssssssssssssso | 27061 | 27080 | 22 |

### Example 2: Activity of Modified Oligonucleotides Complementary to Human SMN2 in Transgenic Mice, Single Dose (35 μg)

[0336] Activity of selected modified oligonucleotides described above was tested in human SMN2 transgenic mice. Taiwan strain of SMA Type III mice were obtained from The Jackson Laboratory (Bar Harbor, Maine). These mice lack mouse SMN and are homozygous for human SMN2 (mSMN −/−; hSMN2 +/+; FVB.Cg-Tg(SMN2)₂HungSMN1tm1Hung/J, stock number 005058; Bar Harbor, Maine), or are heterozygous for mouse SMN and heterozygous for human SMN2(mSMN +/−; hSMN2 +/−; FVB.Cg-Tg(SMN2)2HungSMN1tm1Hung/J) obtained by breeding HOM/HOM (stock #00005058) to FVB/NJ (Stock #001800).

### Treatment

[0337] Homozygous or heterozygous transgenic mice were divided into groups of 4 mice each. Each mouse received a single ICV bolus of 35 μg of modified oligonucleotide. Comparator Compound Nos. 387954, 396442, and 396443 were also tested in this assay. A group of 4 mice received PBS as a negative control.

### RNA Analysis

[0338] Two weeks post treatment, mice were sacrificed and RNA was extracted from cortical brain tissue and spinal cord for real-time qPCR analysis of SMN2 RNA. Primer probe set hSMN2vd #4_LTS00216_MGB (forward sequence: GCTGATGCTTTGGGAAGTATGTTA (SEQ ID NO: 11); reverse sequence CACCTTCCTTCTTTTTGATTTTGTC, designated herein as SEQ ID NO: 12; probe sequence TACATGAGTGGCTATCATACT (SEQ ID NO: 13)) was used to determine the amount of SMN2 RNA including exon 7 (exon 7⁺). Primer probe set hSMN2_Sumner68_PPS50481 (forward sequence: CATGGTACATGAGTGGCTATCATACTG (SEQ ID NO: 14); reverse sequence: TGGTGTCATTTAGTGCTGCTCTATG (SEQ ID NO: 15); probe sequence CCAGCATTTCCATATAATAGC (SEQ ID NO: 16) was used to determine the amount of SMN2 RNA excluding exon 7 (exon 7⁻). Total SMN2 RNA levels were measured using primer probe set hSMN2_LTS00935 (forward sequence: CAGGAGGATTCCGTGCTGTT (SEQ ID NO: 17); reverse sequence CAGTGCTGTATCATCCCAAATGTC, (SEQ ID NO: 18); probe sequence: ACAGGCCAGAGCGAT (SEQ ID NO: 19)).

[0339] Results are presented as fold change in RNA levels relative to PBS control, normalized to total SMN2 levels. Each of Tables 12-18 represents a different experiment.

TABLE 12
Effect of modified oligonucleotides on human SMN2
RNA splicing in homozygous transgenic mice

| Compound | Dose | CORTEX | | SPINAL CORD | |
|---|---|---|---|---|---|
| No. | (μg) | exon 7⁺ | exon 7⁻ | exon 7⁺ | exon 7⁻ |
| PBS | — | 1 | 1 | 1 | 1 |
| 396442 | 35 | 3.3 | 0.3 | 3.4 | 0.3 |
| 396443 | 35 | 3.0 | 0.5 | 2.3 | 0.5 |
| 524403 | 35 | 3.3 | 0.4 | 2.5 | 0.5 |
| 1210339 | 35 | 2.5 | 0.5 | 3.0 | 0.3 |
| 1210340 | 35 | 2.1 | 0.6 | 2.6 | 0.4 |
| 1210341 | 35 | 1.8 | 0.7 | 2.0 | 0.6 |
| 1210342 | 35 | 2.5 | 0.5 | 2.9 | 0.3 |
| 1210343 | 35 | 3.0 | 0.4 | 2.4 | 0.5 |
| 1212817 | 35 | 2.4 | 0.6 | 2.2 | 0.6 |
| 1212818 | 35 | 2.4 | 0.5 | 2.1 | 0.6 |
| 1212823 | 35 | 2.0 | 0.6 | 2.0 | 0.6 |
| 1212824 | 35 | 2.1 | 0.6 | 2.1 | 0.6 |
| 1212825 | 35 | 2.9 | 0.4 | 2.5 | 0.5 |
| 1212826 | 35 | 2.5 | 0.6 | 2.2 | 0.7 |
| 1212827 | 35 | 2.5 | 0.6 | 2.6 | 0.5 |
| 1212828 | 35 | 2.9 | 0.5 | 2.4 | 0.6 |
| 1212830 | 35 | 2.8 | 0.7 | 2.1 | 0.8 |
| 1212831 | 35 | 2.5 | 0.7 | 2.3 | 0.7 |
| 1212832 | 35 | 2.9 | 0.6 | 2.9 | 0.5 |
| 1212833 | 35 | 2.4 | 0.7 | 2.7 | 0.5 |
| 1212837 | 35 | 2.5 | 0.6 | 2.7 | 0.5 |
| 1212838 | 35 | 2.1 | 0.7 | 2.5 | 0.6 |
| 1212844 | 35 | 2.6 | 0.6 | 2.4 | 0.7 |
| 1212845 | 35 | 2.3 | 0.7 | 2.5 | 0.7 |
| 1212846 | 35 | 2.8 | 0.6 | 2.6 | 0.6 |
| 1212849 | 35 | 2.1 | 0.7 | 2.3 | 0.6 |
| 1212850 | 35 | 1.8 | 0.8 | 2.2 | 0.7 |
| 1212855 | 35 | 2.0 | 0.7 | 2.1 | 0.8 |

TABLE 13
Effect of modified oligonucleotides on human SMN2
RNA splicing in homozygous transgenic mice

| Compound | Dose | CORTEX | | SPINAL CORD | |
|---|---|---|---|---|---|
| No. | (μg) | exon 7⁺ | exon 7⁻ | exon 7⁺ | exon 7⁻ |
| PBS | — | 1.0 | 1.0 | 1.0 | 1.0 |
| 396443 | 35 | 2.7 | 0.3 | 1.9 | 0.5 |
| 1210342 | 35 | 2.4 | 0.5 | 2.5 | 0.4 |
| 1212961 | 35 | 1.8 | 0.7 | 1.7 | 0.6 |
| 1212962 | 35 | 2.0 | 0.6 | 1.9 | 0.5 |
| 1212963 | 35 | 2.3 | 0.5 | 2.5 | 0.3 |
| 1212966 | 35 | 1.6 | 0.8 | 2.0 | 0.5 |
| 1212967 | 35 | 1.9 | 0.6 | 1.9 | 0.4 |
| 1212971 | 35 | 1.6 | 0.5 | 2.0 | 0.4 |
| 1212972 | 35 | 1.8 | 0.6 | 2.2 | 0.5 |
| 1212977 | 35 | 2.1 | 0.5 | 2.2 | 0.4 |
| 1212978 | 35 | 2.1 | 0.6 | 2.2 | 0.4 |
| 1212979 | 35 | 2.1 | 0.5 | 2.6 | 0.3 |
| 1212982 | 35 | 2.0 | 0.7 | 1.8 | 0.6 |
| 1212983 | 35 | 1.9 | 0.6 | 1.7 | 0.5 |
| 1212984 | 35 | 1.9 | 0.6 | 1.9 | 0.5 |
| 1212987 | 35 | 2.4 | 0.4 | 2.5 | 0.4 |
| 1212988 | 35 | 1.8 | 0.7 | 1.8 | 0.5 |
| 1212995 | 35 | 2.5 | 0.5 | 2.5 | 0.4 |
| 1212998 | 35 | 1.8 | 0.6 | 1.8 | 0.7 |
| 1212999 | 35 | 2.0 | 0.6 | 2.0 | 0.5 |
| 1213003 | 35 | 1.9 | 0.7 | 2.3 | 0.5 |
| 1213004 | 35 | 1.8 | 0.7 | 2.3 | 0.6 |

TABLE 14
Effect of modified oligonucleotides on human SMN2
RNA splicing in homozygous transgenic mice

| Compound | Dose | CORTEX | | SPINAL CORD | |
|---|---|---|---|---|---|
| No. | (μg) | exon 7⁺ | exon 7⁻ | exon 7⁺ | exon 7⁻ |
| PBS | — | 1.0 | 1.0 | 1.0 | 1.0 |
| 396443 | 35 | 2.6 | 0.5 | 3.1 | 0.5 |
| 1212964 | 35 | 2.5 | 0.6 | 3.6 | 0.4 |
| 1212965 | 35 | 2.9 | 0.5 | 3.3 | 0.4 |
| 1212968 | 35 | 2.2 | 0.6 | 2.3 | 0.6 |
| 1212973 | 35 | 2.6 | 0.5 | 3.2 | 0.4 |
| 1212974 | 35 | 2.3 | 0.6 | 2.8 | 0.5 |
| 1212975 | 35 | 2.9 | 0.3 | 3.1 | 0.4 |
| 1212976 | 35 | 2.5 | 0.5 | 2.8 | 0.5 |
| 1212980 | 35 | 2.6 | 0.5 | 3.2 | 0.4 |
| 1212981 | 35 | 2.9 | 0.4 | 3.6 | 0.3 |
| 1212985 | 35 | 2.4 | 0.6 | 2.9 | 0.5 |
| 1212986 | 35 | 2.8 | 0.4 | 3.3 | 0.4 |
| 1212989 | 35 | 3.3 | 0.3 | 3.6 | 0.2 |
| 1212990 | 35 | 1.8 | 0.8 | 2.1 | 0.7 |
| 1212991 | 35 | 3.2 | 0.3 | 3.8 | 0.3 |
| 1212992 | 35 | 2.4 | 0.5 | 2.2 | 0.6 |
| 1212996 | 35 | 2.2 | 0.6 | 3.2 | 0.5 |
| 1212997 | 35 | 2.9 | 0.4 | 3.9 | 0.4 |
| 1213001 | 35 | 2.1 | 0.5 | 2.8 | 0.6 |
| 1213002 | 35 | 2.0 | 0.6 | 2.9 | 0.6 |
| 1213005 | 35 | 2.8 | 0.5 | 3.2 | 0.3 |
| 1213006 | 35 | 1.9 | 0.9 | 2.0 | 0.8 |
| 1213007 | 35 | 3.3 | 0.2 | 2.9 | 0.5 |
| 1213008 | 35 | 2.3 | 0.7 | 2.2 | 0.7 |

TABLE 15
Effect of modified oligonucleotides on human SMN2
RNA splicing in heterozygous transgenic mice

| Compound | Dose | CORTEX | | SPINAL CORD | |
|---|---|---|---|---|---|
| No. | (μg) | exon 7⁺ | exon 7⁻ | exon 7⁺ | exon 7⁻ |
| PBS | — | 1.0 | 1.0 | 1.0 | 1.0 |
| 387954 | 35 | 2.3 | 0.6 | 2.2 | 0.5 |
| 396443 | 35 | 2.5 | 0.5 | 2.4 | 0.5 |
| 1287048 | 35 | 2.2 | 0.5 | 2.2 | 0.5 |
| 1287049 | 35 | 2.3 | 0.6 | 2.5 | 0.4 |
| 1287061 | 35 | 2.4 | 0.5 | 2.2 | 0.4 |
| 1287062 | 35 | 3.0 | 0.3 | 2.3 | 0.4 |
| 1287050 | 35 | 2.8 | 0.5 | 2.3 | 0.4 |
| 1287054 | 35 | 2.2 | 0.5 | 2.3 | 0.4 |
| 1287063 | 35 | 1.8 | 0.7 | 1.7 | 0.6 |
| 1287064 | 35 | 2.6 | 0.3 | 2.4 | 0.4 |
| 1287065 | 35 | 2.5 | 0.4 | 2.3 | 0.4 |
| 1287066 | 35 | 2.2 | 0.5 | 2 | 0.5 |
| 1287075 | 35 | 2.3 | 0.6 | 1.8 | 0.7 |
| 1287076 | 35 | 2.6 | 0.4 | 1.9 | 0.6 |
| 1287067 | 35 | 2.7 | 0.4 | 1.9 | 0.6 |
| 1287070 | 35 | 2.5 | 0.5 | 1.8 | 0.7 |
| 1287071 | 35 | 2.6 | 0.4 | 1.8 | 0.7 |
| 1287074 | 35 | 2.6 | 0.5 | 2 | 0.6 |
| 1287109 | 35 | 2.7 | 0.6 | 2.4 | 0.5 |
| 1287110 | 35 | 2.6 | 0.5 | 2.3 | 0.5 |
| 1287701 | 35 | 2.6 | 0.6 | 2.8 | 0.3 |
| 1287702 | 35 | 3 | 0.5 | 2.8 | 0.4 |
| 1287703 | 35 | 2.3 | 0.6 | 2.4 | 0.4 |
| 1287704 | 35 | 2.7 | 0.5 | 2.3 | 0.4 |
| 1287717 | 35 | 3.3 | 0.3 | 2.4 | 0.6 |

TABLE 16
Effect of modified oligonucleotides on human SMN2
RNA splicing in heterozygous transgenic mice

| Compound | Dose | CORTEX | | SPINAL CORD | |
|---|---|---|---|---|---|
| No. | (μg) | exon 7⁺ | exon 7⁻ | exon 7⁺ | exon 7⁻ |
| PBS | — | 1 | 1 | 1 | 1 |
| 396442 | 35 | 2.5 | 0.6 | 3.2 | 0.3 |
| 396443 | 35 | 3 | 0.5 | 2.8 | 0.5 |
| 1263783 | 35 | 3 | 0.3 | 2.6 | 0.5 |
| 1263785 | 35 | 3.1 | 0.4 | 2.9 | 0.5 |
| 1263787 | 35 | 2.4 | 0.6 | 2.9 | 0.4 |
| 1263789 | 35 | 3.8 | 0.2 | 2.6 | 0.5 |
| 1263800 | 35 | 3.6 | 0.2 | 2.6 | 0.5 |
| 1263802 | 35 | 3.4 | 0.3 | 2.9 | 0.4 |
| 1263806 | 35 | 3.5 | 0.2 | 2.7 | 0.5 |
| 1263808 | 35 | 3.2 | 0.4 | 2.7 | 0.5 |
| 1263810 | 35 | 2.8 | 0.5 | 2.4 | 0.5 |

TABLE 17
Effect of modified oligonucleotides on human SMN2
RNA splicing in heterozygous transgenic mice

| Compound | Dose | CORTEX | | SPINAL CORD | |
|---|---|---|---|---|---|
| No. | (μg) | exon 7⁺ | exon 7⁻ | exon 7⁺ | exon 7⁻ |
| PBS | — | 1 | 1 | 1 | 1 |
| 396443 | 35 | 2.5 | 0.6 | 2.9 | 0.4 |
| 1364784 | 35 | 2.3 | 0.7 | 2.8 | 0.5 |
| 1364783 | 35 | 2.9 | 0.5 | 2.4 | 0.5 |
| 1364777 | 35 | 2.7 | 0.6 | 2.3 | 0.5 |
| 1364782 | 35 | 2.7 | 0.6 | 2.6 | 0.5 |

TABLE 18
Effect of modified oligonucleotides on human SMN2
RNA splicing in heterozygous transgenic mice

| Compound | Dose | CORTEX | | SPINAL CORD | |
|---|---|---|---|---|---|
| No. | (μg) | exon 7⁺ | exon 7⁻ | exon 7⁺ | exon 7⁻ |
| PBS | — | 1 | 1 | 1 | 1 |
| 396443 | 35 | 2 | 0.7 | 2.7 | 0.5 |
| 1318748 | 35 | 2.1 | 0.7 | 2.5 | 0.6 |
| 1318782 | 35 | 2.2 | 0.8 | 2.5 | 0.6 |
| 1332262 | 35 | 3.3 | 0.4 | 2.9 | 0.5 |
| 1332258 | 35 | 2.4 | 0.7 | 2.3 | 0.6 |

### Example 3: Activity of Modified Oligonucleotides Complementary to Human SMN2 in Transgenic Mice, Single Dose (15 μg)

[0340] Activity of selected modified oligonucleotides described above was tested in human SMN2 transgenic mice essentially as described above in Example 2. Comparator Compound Nos. 396443 and 819735 were also tested in this assay. The transgenic mice were divided into groups of 4 mice each. Each mouse received a single ICV bolus of 15 μg of modified oligonucleotide. A group of 4 mice received PBS as a negative control. Two weeks post treatment, mice were sacrificed and RNA was extracted from cortical brain tissue and spinal cord for real-time qPCR analysis of SMN2 RNA. Results are presented as fold change in RNA levels relative to PBS control, normalized to total SMN2 levels. Each of Tables 19-23 represents a different experiment.

TABLE 19
Effect of modified oligonucleotides on human SMN2
RNA splicing in homozygous transgenic mice

| Compound | Dose | CORTEX | | SPINAL CORD | |
|---|---|---|---|---|---|
| No. | (μg) | exon 7⁺ | exon 7⁻ | exon 7⁺ | exon 7⁻ |
| PBS | — | 1.0 | 1.0 | 1.0 | 1.0 |
| 819735 | 15 | 2.4 | 0.4 | 3.3 | 0.3 |
| 1212869 | 15 | 2.4 | 0.4 | 3.2 | 0.4 |
| 1212870 | 15 | 2.1 | 0.5 | 2.8 | 0.4 |
| 1212873 | 15 | 2.2 | 0.4 | 2.0 | 0.6 |
| 1212874 | 15 | 2.1 | 0.5 | 2.4 | 0.6 |
| 1212875 | 15 | 2.1 | 0.5 | 2.3 | 0.5 |
| 1212880 | 15 | 1.7 | 0.6 | 2.0 | 0.6 |
| 1212881 | 15 | 1.8 | 0.6 | 2.3 | 0.6 |
| 1212885 | 15 | 2.3 | 0.4 | 2.4 | 0.5 |
| 1212887 | 15 | 2.0 | 0.5 | 2.2 | 0.5 |
| 1212931 | 15 | 2.9 | 0.2 | 2.9 | 0.3 |
| 1212936 | 15 | 2.9 | 0.3 | 3.3 | 0.3 |
| 1212941 | 15 | 3.0 | 0.1 | 3.4 | 0.2 |

TABLE 20
Effect of modified oligonucleotides on human SMN2
RNA splicing in heterozygous transgenic mice

| Compound | Dose | CORTEX | | SPINAL CORD | |
|---|---|---|---|---|---|
| No. | (μg) | exon 7⁺ | exon 7⁻ | exon 7⁺ | exon 7⁻ |
| PBS | — | 1.0 | 1.0 | 1.0 | 1.0 |
| 396443 | 15 | 2.2 | 0.5 | 2.2 | 0.7 |
| 819735 | 15 | 2.7 | 0.5 | 3.1 | 0.5 |
| 1287122 | 15 | 2.9 | 0.5 | 2.3 | 0.6 |
| 1287123 | 15 | 3.0 | 0.4 | 3.0 | 0.4 |
| 1287124 | 15 | 3.0 | 0.4 | 3.2 | 0.3 |
| 1287125 | 15 | 3.0 | 0.4 | 3.0 | 0.4 |
| 1287126 | 15 | 2.8 | 0.4 | 2.8 | 0.4 |
| 1287127 | 15 | 2.7 | 0.5 | 3.0 | 0.5 |
| 1287128 | 15 | 2.6 | 0.5 | 3.2 | 0.5 |
| 1287129 | 15 | 2.9 | 0.4 | 2.9 | 0.5 |
| 1287130 | 15 | 3.7 | 0.1 | 3.1 | 0.5 |
| 1287131 | 15 | 2.2 | 0.6 | 2.7 | 0.4 |
| 1287132 | 15 | 3.2 | 0.3 | 2.2 | 0.6 |
| 1287133 | 15 | 2.9 | 0.4 | 2.8 | 0.4 |
| 1287728 | 15 | 2.8 | 0.6 | 3.4 | 0.3 |
| 1287729 | 15 | 3.1 | 0.4 | 3.0 | 0.3 |
| 1287730 | 15 | 3.1 | 0.3 | 2.7 | 0.4 |
| 1287731 | 15 | 3.3 | 0.3 | 2.8 | 0.5 |
| 1287735 | 15 | 2.9 | 0.5 | 2.6 | 0.5 |
| 1287738 | 15 | 3.7 | 0.2 | 3.2 | 0.3 |
| 1287739 | 15 | 3.3 | 0.4 | 3.2 | 0.4 |
| 1287743 | 15 | 3.6 | 0.4 | 3.8 | 0.4 |
| 1287745 | 15 | 3.1 | 0.5 | 3.8 | 0.5 |

TABLE 21
Effect of modified oligonucleotides on human SMN2
RNA splicing in heterozygous transgenic mice

| Compound | Dose | CORTEX | | SPINAL CORD | |
|---|---|---|---|---|---|
| No. | (μg) | exon 7⁺ | exon 7⁻ | exon 7⁺ | exon 7⁻ |
| PBS | — | 1 | 1 | 1 | 1.0 |
| 396443 | 15 | 1.9 | 0.6 | 1.7 | 0.7 |
| 819735 | 15 | 2.3 | 0.5 | 1.9 | 0.6 |

TABLE 22
Effect of modified oligonucleotides on human SMN2
RNA splicing in heterozygous transgenic mice

| Compound | Dose | CORTEX | | SPINAL CORD | |
|---|---|---|---|---|---|
| No. | (μg) | exon 7⁺ | exon 7⁻ | exon 7⁺ | exon 7⁻ |
| PBS | — | 1 | 1 | 1 | 1 |
| 1364781 | 15 | 2.5 | 0.6 | 2.7 | 0.4 |
| 1364780 | 15 | 2.8 | 0.5 | 2.6 | 0.5 |
| 1364779 | 15 | 2.7 | 0.5 | 2.6 | 0.5 |
| 1364778 | 15 | 3 | 0.5 | 2.7 | 0.4 |

TABLE 23
Effect of modified oligonucleotides on human SMN2
RNA splicing in heterozygous transgenic mice

| Compound | Dose | CORTEX | | SPINAL CORD | |
|---|---|---|---|---|---|
| No. | (μg) | exon 7⁺ | exon 7⁻ | exon 7⁺ | exon 7⁻ |
| PBS | — | 1 | 1 | 1 | 1 |
| 819735 | 15 | 2.8 | 0.5 | 2.4 | 0.6 |
| 1332265 | 15 | 2.1 | 0.7 | 2.6 | 0.6 |
| 1332269 | 15 | 2.5 | 0.6 | 2.7 | 0.5 |
| 1332268 | 15 | 2.9 | 0.5 | 2.3 | 0.6 |
| 1318756 | 15 | 2.2 | 0.7 | 2.4 | 0.6 |
| 1333508 | 15 | 2 | 0.6 | 2.2 | 0.6 |
| 1332251 | 15 | 2.9 | 0.5 | 1.9 | 0.7 |
| 1332249 | 15 | 2.3 | 0.7 | 2.3 | 0.7 |

### Example 4: Activity of Modified Oligonucleotides Complementary to Human SMN2 in Transgenic Mice, Single Dose (70 μg)

[0341] Activity of modified oligonucleotides was tested in human SMN2 transgenic mice essentially as described above in Example 2. The transgenic mice were divided into groups of 4 mice each. Each mouse received a single ICV bolus of 70 μg modified oligonucleotide. A group of 4 mice received PBS as a negative control. Two weeks post treatment, mice were sacrificed and RNA was extracted from cortical brain tissue and spinal cord for real-time qPCR analysis of SMN2 RNA. Results are presented as fold change in RNA levels relative to PBS control, normalized to total SMN2 levels.

TABLE 24
Effect of modified oligonucleotides on human SMN2
RNA splicing in homozygous transgenic mice

| Compound | Dose | CORTEX | | SPINAL CORD | |
|---|---|---|---|---|---|
| No. | (μg) | exon 7⁺ | exon 7⁻ | exon 7⁺ | exon 7⁻ |
| PBS | — | 1 | 1 | 1 | 1 |
| U12969 | 70 | 2.5 | 0.4 | 2.4 | 0.3 |
| U12970 | 70 | 2.7 | 0.3 | 2.6 | 0.3 |

### Example 5: Activity of Modified Oligonucleotides Complementary to Human SMN2 in Transgenic Mice, Multiple Dose

[0342] Activity of selected modified oligonucleotides described above was tested in human SMN2 transgenic mice essentially as described above in Example 2. Comparator Compound No. 396443 was also tested in this assay. The transgenic mice were divided into groups of 4 mice each. Each mouse received a single ICV bolus of modified oligonucleotide at multiple doses as indicated in the tables below. A group of 4 mice received PBS as a negative control. Two weeks post treatment, mice were sacrificed and RNA was extracted from coronal brain and spinal cord for real-time qPCR analysis of SMN2 RNA. Results are presented as fold change in RNA levels relative to PBS control, normalized to total SMN2 levels. ED₅₀ for exon inclusion (exon 7⁺) was calculated in GraphPad Prism 7 using nonlinear regression, 4-parameter dose response curve [Y=Bottom+(Top−Bottom)/(1+(10\hat{ } log EC50/X)\hat{ }HillSlope)].

TABLE 25
Effect of modified oligonucleotides on human
SMN2 RNA splicing in homozygous transgenic mice

| | Dose | CORONAL BRAIN | | ED50 | SPINAL CORD | | ED50 |
|---|---|---|---|---|---|---|---|
| Compound No. | (μg) | exon 7⁺ | exon 7⁻ | (μg) | exon 7⁺ | exon 7⁻ | (μg) |
| PBS | — | 1.0 | 1.0 | | 1.0 | 1.0 | |
| 396443 | 3 | 1.4 | 0.9 | 32.5 | 1.3 | 0.9 | 22.1 |
| | 10 | 1.8 | 0.8 | | 2.0 | 0.7 | |
| | 30 | 2.6 | 0.5 | | 2.6 | 0.4 | |
| | 100 | 3.5 | 0.4 | | 3.2 | 0.3 | |
| | 300 | 4.2 | 0.1 | | 3.6 | 0.2 | |
| 1263789 | 3 | 1.5 | 0.9 | 38.3 | 1.5 | 0.8 | 13.3 |
| | 10 | 2.0 | 0.7 | | 2.2 | 0.6 | |
| | 30 | 2.3 | 0.6 | | 3.0 | 0.4 | |
| | 100 | 3.4 | 0.3 | | 3.4 | 0.3 | |
| | 300 | 3.9 | 0.1 | | 3.7 | 0.2 | |
| 1287717 | 3 | 1.3 | 0.8 | 38.7 | 1.3 | 0.9 | 20.5 |
| | 10 | 1.8 | 0.7 | | 1.9 | 0.7 | |
| | 30 | 2.4 | 0.7 | | 2.7 | 0.5 | |
| | 100 | 3.5 | 0.4 | | 3.3 | 0.3 | |
| | 300 | 4.1 | 0.1 | | 3.8 | 0.2 | |
| 1358996 | 3 | 1.6 | 0.9 | 16.6 | 1.7 | 0.8 | 7.4 |
| | 10 | 2.5 | 0.6 | | 2.6 | 0.5 | |
| | 30 | 3.0 | 0.4 | | 3.5 | 0.2 | |
| | 100 | 4.0 | 0.2 | | 3.6 | 0.2 | |
| | 300 | 4.0 | 0.1 | | 3.9 | 0.1 | |
| 1287745 | 3 | 1.5 | 0.8 | 22.8 | 1.7 | 0.7 | 8.8 |
| | 10 | 2.1 | 0.6 | | 2.4 | 0.5 | |
| | 30 | 3.0 | 0.3 | | 3.3 | 0.3 | |
| | 100 | 3.6 | 0.1 | | 3.5 | 0.2 | |
| | 300 | 4.2 | 0.1 | | 3.8 | 0.1 | |

### Example 6: Tolerability of Modified Oligonucleotides Complementary to SMN2 in Wild-Type Mice, 3 Hour Study

[0343] Modified oligonucleotides described above were tested in wild-type female C57/B16 mice to assess tolerability. Wild-type female C57/B16 mice each received a single ICV dose of 700 ag of modified oligonucleotide listed in the tables below. Comparator Compound No. 396443 was also tested in this assay with a dose of 350 μg. Comparator Compound Nos. 387954, 396442, 443305, and 819735 were also tested in this assay with a dose of 700 μg. Each treatment group consisted of 4 mice. A group of 4 mice received PBS as a negative control for each experiment (identified in separate tables below). At 3 hours post-injection, mice were evaluated according to seven different criteria. The criteria are (1) the mouse was bright, alert, and responsive; (2) the mouse was standing or hunched without stimuli; (3) the mouse showed any movement without stimuli; (4) the mouse demonstrated forward movement after it was lifted: (5) the mouse demonstrated any movement after it was lifted: (6) the mouse responded to tail pinching: (7) regular breathing. For each of the 7 criteria, a mouse was given a subscore of 0 if it met the criteria and 1 if it did not (the functional observational battery score or FOB). After all 7 criteria were evaluated, the scores were summed and averaged within each treatment group. The results are presented in the tables below. Each of Tables 26-49 represents a different experiment.

TABLE 26
Tolerability dose scores
in mice at 350 μg

| Compound | 3 hr |
|---|---|
| Number | FOB |
| PBS | 0 |
| 396443 | 4.0 |

TABLE 27
Tolerability dose scores
in mice at 700 μg

| Compound | 3 hr |
|---|---|
| Number | FOB |
| PBS | 0.00 |
| 443305 | 4.75 |

TABLE 28
Tolerability scores in
mice at 700 μg dose

| Compound | 3 hr |
|---|---|
| Number | FOB |
| PBS | 0 |
| 396442 | 2.5 |
| 524403 | 3.25 |
| 1210339 | 1.25 |
| 1210340 | 2.25 |
| 1210341 | 3.75 |
| 1210342 | 0 |
| 1210343 | 0 |
| 1212817 | 0 |
| 1212818 | 0 |
| 1212819 | 0 |
| 1212820 | 0 |
| 1212821 | 0 |
| 1212822 | 0 |
| 1212823 | 0 |
| 1212824 | 0 |
| 1212825 | 1 |
| 1212826 | 0 |
| 1212827 | 0 |
| 1212828 | 0 |
| 1212829 | 0 |
| 1212830 | 0 |
| 1212831 | 0 |

TABLE 29
Tolerability scores in
mice at 700 μg dose

| Compound | 3 hr |
|---|---|
| Number | FOB |
| PBS | 0.00 |
| 396442 | 2.50 |
| 1210340 | 3.50 |
| 1212850 | 0.50 |
| 1212851 | 0.75 |
| 1212852 | 0.00 |
| 1212853 | 0.00 |
| 1212854 | 0.25 |
| 1212855 | 0.25 |
| 1212856 | 0.00 |
| 1212857 | 0.00 |
| 1212858 | 0.00 |
| 1212859 | 0.00 |
| 1212860 | 0.75 |
| 1212861 | 1.00 |
| 1212863 | 2.00 |
| 1212864 | 0.00 |
| 1212866 | 0.75 |
| 1212867 | 0.00 |
| 1212868 | 0.00 |

TABLE 30
Tolerability scores in
mice at 700 μg dose

| Compound | 3 hr |
|---|---|
| Number | FOB |
| PBS | 0.00 |
| 396442 | 3.25 |
| 1212961 | 0.00 |
| 1212963 | 1.00 |
| 1212964 | 2.00 |
| 1212965 | 1.25 |
| 1212966 | 1.25 |
| 1212968 | 0.00 |
| 1212971 | 1.00 |
| 1212972 | 3.25 |
| 1212973 | 0.50 |
| 1212974 | 2.00 |
| 1212975 | 0.50 |
| 1212976 | 1.75 |

TABLE 31
Tolerability scores in
mice at 700 μg dose

| Compound | 3 hr |
|---|---|
| Number | FOB |
| PBS | 0.00 |
| 1212977 | 0.75 |
| 1212978 | 0.00 |
| 1212979 | 1.75 |
| 1212980 | 1.50 |
| 1212981 | 0.00 |
| 1212982 | 0.50 |
| 1212983 | 0.75 |
| 1212984 | 2.75 |
| 1212985 | 0.00 |
| 1212986 | 1.00 |
| 1212987 | 1.75 |
| 1212988 | 4.50 |
| 1212989 | 1.75 |
| 1212990 | 4.50 |
| 1212991 | 1.25 |
| 1212992 | 3.75 |

TABLE 32
Tolerability scores in
mice at 700 μg dose

| Compound | 3 hr |
|---|---|
| Number | FOB |
| PBS | 0.00 |
| 1212993 | 7.00 |
| 1212994 | 6.50 |
| 1212995 | 4.25 |
| 1212996 | 3.25 |
| 1212997 | 4.00 |
| 1212998 | 2.00 |
| 1212999 | 1.00 |
| 1213000 | 1.25 |
| 1213001 | 3.00 |
| 1213002 | 2.00 |
| 1213003 | 4.00 |
| 1213004 | 3.00 |
| 1213005 | 3.75 |
| 1213006 | 4.00 |
| 1213007 | 4.00 |
| 1213008 | 3.50 |

TABLE 33
Tolerability scores in
mice at 700 μg dose

| Compound | 3 hr |
|---|---|
| Number | FOB |
| PBS | 0.00 |
| 1212832 | 0.00 |
| 1212833 | 0.00 |
| 1212834 | 0.00 |
| 1212835 | 0.00 |
| 1212836 | 0.00 |
| 1212837 | 0.00 |
| 1212838 | 0.00 |
| 1212839 | 0.00 |
| 1212840 | 0.00 |
| 1212841 | 0.00 |
| 1212842 | 0.00 |
| 1212843 | 0.00 |
| 1212844 | 0.25 |
| 1212845 | 1.00 |
| 1212846 | 0.00 |
| 1212847 | 0.00 |
| 1212848 | 0.00 |
| 1212849 | 0.00 |

TABLE 34
Tolerability scores in
mice at 700 μg dose

| Compound | 3 hr |
|---|---|
| Number | FOB |
| PBS | 0.00 |
| 396442 | 1.75 |
| 1210339 | 1.00 |
| 1212865 | 1.00 |
| 1212962 | 0.00 |
| 1212967 | 0.50 |
| 1212969 | 0.50 |
| 1212970 | 1.25 |

TABLE 35
Tolerability scores in
mice at 700 μg dose

| Compound | 3 hr |
|---|---|
| Number | FOB |
| PBS | 0.00 |
| 819735 | 2.00 |
| 1212869 | 2.00 |
| 1212870 | 4.75 |
| 1212871 | 1.00 |
| 1212873 | 0.00 |
| 1212874 | 0.00 |
| 1212875 | 0.00 |
| 1212879 | 3.00 |
| 1212880 | 0.00 |
| 1212881 | 4.00 |
| 1212885 | 1.00 |
| 1212887 | 2.25 |
| 1212931 | 2.00 |
| 1212936 | 2.00 |
| 1212941 | 1.25 |

TABLE 36
Tolerability scores in
mice at 700 μg dose

| Compound | 3 hr |
|---|---|
| Number | FOB |
| PBS | 0.00 |
| 1263778 | 0.00 |
| 1263781 | 0.00 |
| 1263783 | 0.00 |
| 1263785 | 1.00 |
| 1263787 | 0.00 |
| 1263789 | 0.00 |
| 1263791 | 0.00 |
| 1263793 | 0.00 |
| 1263795 | 0.00 |
| 1263797 | 0.00 |
| 1263799 | 0.00 |
| 1263800 | 0.00 |
| 1263802 | 0.00 |
| 1263804 | 0.00 |
| 1263806 | 0.00 |
| 1263808 | 1.00 |
| 1263810 | 0.00 |
| 1263812 | 0.00 |
| 1263814 | 1.00 |
| 1263816 | 0.50 |
| 1263818 | 0.00 |
| 1263820 | 0.00 |
| 1263822 | 0.25 |
| 1263824 | 0.00 |

TABLE 37
Tolerability scores in
mice at 700 μg dose

| Compound | 3 hr |
|---|---|
| Number | FOB |
| PBS | 0.00 |
| 1263826 | 0.00 |

TABLE 38
Tolerability scores in
mice at 700 μg dose

| Compound | 3 hr |
|---|---|
| Number | FOB |
| PBS | 0.00 |
| 387954 | 4.00 |
| 1287048 | 0.00 |
| 1287049 | 0.00 |
| 1287050 | 2.00 |
| 1287051 | 3.25 |
| 1287052 | 3.50 |
| 1287053 | 2.75 |
| 1287054 | 2.00 |
| 1287055 | 3.25 |
| 1287056 | 4.00 |
| 1287057 | 3.00 |
| 1287058 | 4.00 |
| 1287059 | 4.00 |
| 1287060 | 4.00 |
| 1287061 | 4.00 |
| 1287062 | 3.50 |

TABLE 39
Tolerability scores in
mice at 700 μg dose

| Compound | 3 hr |
|---|---|
| Number | FOB |
| PBS | 0.00 |
| 1287106 | 3.50 |
| 1287107 | 4.00 |
| 1287108 | 3.75 |
| 1287109 | 3.25 |
| 1287110 | 3.00 |
| 1287111 | 4.75 |
| 1287112 | 4.00 |
| 1287113 | 3.50 |
| 1287114 | 3.25 |
| 1287115 | 3.50 |
| 1287116 | 4.00 |
| 1287117 | 4.25 |
| 1287118 | 3.00 |
| 1287119 | 3.50 |
| 1287120 | 3.75 |
| 1287121 | 2.75 |

TABLE 40
Tolerability scores in
mice at 700 μg dose

| Compound | 3 hr |
|---|---|
| Number | FOB |
| PBS | 0.00 |
| 1287063 | 0.00 |
| 1287064 | 0.00 |
| 1287065 | 1.00 |
| 1287066 | 3.75 |
| 1287067 | 1.00 |
| 1287068 | 2.50 |
| 1287069 | 2.25 |
| 1287071 | 1.00 |
| 1287072 | 3.00 |
| 1287073 | 3.75 |
| 1287074 | 1.75 |
| 1287075 | 3.50 |
| 1287076 | 2.00 |

TABLE 41
Tolerability scores in
mice at 700 μg dose

| Compound | 3 hr |
|---|---|
| Number | FOB |
| PBS | 0.00 |
| 1287070 | 2.00 |
| 1287701 | 2.50 |
| 1287702 | 3.75 |
| 1287703 | 3.75 |
| 1287705 | 4.00 |
| 1287706 | 4.00 |
| 1287707 | 4.00 |
| 1287709 | 4.75 |
| 1287710 | 4.00 |
| 1287711 | 4.75 |
| 1287712 | 4.00 |
| 1287713 | 4.00 |
| 1287714 | 3.50 |
| 1287715 | 4.00 |
| 1287716 | 4.00 |
| 1287717 | 3.25 |

TABLE 42
Tolerability scores in
mice at 700 μg dose

| Compound | 3 hr |
|---|---|
| Number | FOB |
| PBS | 0.00 |
| 1287728 | 1.00 |
| 1287729 | 1.25 |
| 1287730 | 2.00 |
| 1287731 | 2.50 |
| 1287732 | 3.00 |
| 1287733 | 3.25 |
| 1287734 | 3.00 |
| 1287735 | 0.50 |
| 1287736 | 2.50 |
| 1287737 | 4.00 |
| 1287738 | 3.00 |
| 1287739 | 2.50 |
| 1287740 | 2.75 |
| 1287741 | 3.75 |
| 1287742 | 3.00 |
| 1287743 | 2.75 |
| 1287744 | 2.25 |
| 1287745 | 1.00 |

TABLE 43
Tolerability scores in
mice at 700 μg dose

| Compound | 3 hr |
|---|---|
| Number | FOB |
| PBS | 0.00 |
| 1287122 | 0.00 |
| 1287123 | 0.00 |
| 1287124 | 3.50 |
| 1287125 | 3.00 |
| 1287126 | 3.00 |
| 1287127 | 0.00 |
| 1287128 | 0.00 |
| 1287129 | 4.00 |
| 1287130 | 2.75 |
| 1287131 | 2.50 |
| 1287132 | 2.75 |
| 1287133 | 3.25 |
| 1287704 | 3.50 |
| 1287708 | 3.50 |

TABLE 44
Tolerability scores in
mice at 700 μg dose

| Compound | 3 hr |
|---|---|
| Number | FOB |
| PBS | 0.00 |
| 1318748 | 2.00 |
| 1318765 | 4.00 |
| 1318767 | 4.25 |
| 1318770 | 3.75 |
| 1318771 | 4.50 |
| 1318772 | 4.25 |
| 1318773 | 4.25 |
| 1318774 | 3.50 |
| 1318775 | 3.75 |
| 1318776 | 3.75 |
| 1318777 | 4.00 |
| 1318778 | 4.00 |
| 1318779 | 4.00 |
| 1318780 | 4.00 |
| 1318781 | 4.00 |
| 1318782 | 1.00 |
| 1318783 | 4.00 |
| 1318784 | 2.00 |

TABLE 45
Tolerability scores in
mice at 700 μg dose

| Compound | 3 hr |
|---|---|
| Number | FOB |
| PBS | 0.00 |
| 1318757 | 4.00 |
| 1318758 | 4.25 |
| 1318759 | 3.75 |
| 1318760 | 3.75 |
| 1318761 | 4.00 |
| 1318762 | 4.00 |
| 1318763 | 4.00 |
| 1318764 | 3.75 |
| 1318766 | 3.75 |
| 1318768 | 4.00 |
| 1318769 | 4.00 |

TABLE 46
Tolerability scores in
mice at 700 μg dose

| Compound | 3 hr |
|---|---|
| Number | FOB |
| PBS | 0.00 |
| 1318749 | 4.25 |
| 1318750 | 2.25 |
| 1318751 | 4.00 |
| 1318752 | 3.75 |
| 1318753 | 2.25 |
| 1318754 | 3.00 |
| 1318755 | 3.75 |
| 1318756 | 0.00 |

TABLE 47
Tolerability scores in
mice at 700 μg dose

| Compound | 3 hr |
|---|---|
| Number | FOB |
| PBS | 0.00 |
| 1332247 | 1.75 |
| 1332248 | 0.25 |
| 1332249 | 0.00 |
| 1332250 | 3.75 |
| 1332251 | 0.00 |
| 1332252 | 3.00 |
| 1332263 | 2.00 |
| 1332265 | 1.50 |
| 1332266 | 1.00 |
| 1332267 | 3.75 |
| 1332268 | 2.75 |
| 1332269 | 1.25 |
| 1332270 | 2.25 |
| 1332271 | 2.50 |
| 1333508 | 0.00 |

TABLE 48
Tolerability scores in
mice at 700 μg dose

| Compound | 3 hr |
|---|---|
| Number | FOB |
| PBS | 0.00 |
| 1332255 | 1.00 |
| 1332256 | 2.00 |
| 1332257 | 1.25 |
| 1332258 | 1.25 |
| 1332259 | 2.25 |
| 1332260 | 2.25 |
| 1332261 | 2.50 |
| 1332262 | 2.00 |

TABLE 49
Tolerability scores in
mice at 700 μg dose

| Compound | 3 hr |
|---|---|
| Number | FOB |
| PBS | 0.00 |
| 1358996 | 0.00 |
| 1364777 | 2.00 |
| 1364778 | 3.00 |
| 1364779 | 3.50 |
| 1364780 | 3.50 |
| 1364781 | 5.25 |
| 1364782 | 2.50 |
| 1364783 | 3.50 |
| 1364784 | 3.50 |

### Example 7: Tolerability of Modified Oligonucleotides Complementary to Human SMN2 in Rats, Long-Term Assessment

[0344] In separate studies run under the same conditions, selected modified oligonucleotides described above were tested in Sprague Dawley rats to assess long-term tolerability. Comparator Compound Nos. 396442 and 819735 were also tested in this assay. Sprague Dawley rats each received a single intrathecal (IT) delivered dose of 3 mg of oligonucleotide or PBS. Beginning 1 week post-treatment, each animal was weighed and evaluated weekly by a trained observer for adverse events. Adverse events were defined as neurological dysfunction not typical in PBS-treated control animals, including, but not limited to: abnormal limb splay, abnormal gait, tremors, abnormal respiration, paralysis, and spasticity. The onset of the adverse event is defined as the week post-dosing when the dysfunction was first recorded. If no adverse event was achieved, there is no onset (−). The onset of adverse events typically correlates with a failure to thrive as defined by a lack of body weight gain/maintenance similar to PBS-treated animals. Similar tolerability assessments were described in Oestergaard et al., Nucleic Acids Res., 2013 November, 41(21), 9634-9650 and Southwell et al., Mol Ther., 2014 December, 22(12), 2093-2106.

[0345] At the end of the study, the rats were sacrificed and tissues were collected. Histopathology was performed on sections of cerebellum using calbindin stain. Purkinje cell loss was observed in calbindin stained cerebellum sections as indicated in the table below. Cerebellum and spinal cord were also evaluated using an antibody specific for modified oligonucleotides. Animals demonstrating no oligonucleotide uptake were excluded from histopathology analysis. Histology was not completed for animals that were sacrificed early due to adverse events. Additionally, cortical GFAP, a marker of astrogliosis (Abdelhak, et al., Scientific Reports, 2018, 8, 14798), was measured using RT-PCR, and average elevations >2-fold are noted below.

TABLE 50
Long-term tolerability in rats at 3 mg dose

| | Adverse | Purkinje | |
|---|---|---|---|
| | event | cell | |
| | onset, | loss (# | Cortex |
| | weeks | animals | GFAP |
| | post- | with | mRNA |
| | treatment, | loss/# | >2-fold |
| Compound | individual | animals | PBS |
| Number | animals | tested) | Control |
| PBS | No | Not observed | N/A |
| 396442 | 6, 6, 2 | 2/3 | Yes |
| 819735 | 4, 6, 6, — | 1/4 | Yes |
| 1263789 | —, —, — | 0/3 | No |
| 1287717 | —, —, —, —, —, —, —, — | 0/8 | No |
| 1287745 | —, —, —, —, —, —, — | 0/7 | No |
| 1358996 | —, —, —, — | 0/4 | No |
| 1263783 | —, —, —, — | 0/4 | No |
| 1263785 | —, —, — | 0/3 | No |
| 1263787 | —, —, —, — | 0/4 | No |
| 1263800 | —, — | 0/2 | No |
| 1263802 | —, —, — | 0/3 | No |
| 1263806 | —, —, — | 0/3 | No |
| 1263808 | —, —, — | 0/3 | No |
| 1263810 | —, —, — | 0/3 | No |

### Example 8: Tolerability and Pharmacokinetics of Modified Oligonucleotides in Non-Human Primates, Single or Repeat Dosing

[0346] Cynomolgus monkeys are treated with modified oligonucleotides to determine the local and systemic tolerability and pharmacokinetics of the modified oligonucleotides. Each group receives either artificial CSF or modified oligonucleotide as a single intrathecal lumbar bolus dose injection (IT), or, for repeat-dosing groups, an IT bolus dose on day 1 of the study, followed by IT bolus doses at later time points. Tissues are collected 1 week after the final injection.

In a single dose study, monkeys are administered a single dose of modified oligonucleotide and tolerability is assessed. Representative doses for single-dose studies in adult cynomolgus monkeys include 1 mg, 3 mg, 7 mg, and 35 mg.

[0347] In a repeat-dosing study, monkeys are administered an IT bolus dose on day 1 of the study, followed by weekly (e.g., days 8, 15, and 22 for a four-week study) or monthly (e.g., days 29, 57, and 84 for a 13 week study) IT bolus dosing. Representative doses for repeat-dose studies in adult cynomolgus studies include 1 mg, 3 mg, 7 mg, and 35 mg. Assessment of tolerability is based on clinical observations, body weights, food consumption, physical and neurological examinations including sensorimotor reflexes, cerebral reflexes and spinal reflexes, coagulation, hematology, clinical chemistry (blood and cerebral spinal fluid (CSF)), cell count, and anatomic pathology evaluations. Complete necropsies are performed with a recording of any macroscopic abnormality. Organ weights are taken and microscopic examinations are conducted. Blood is collected for complement analysis. In addition, blood, CSF, and tissues (at necropsy) are collected for toxicokinetic evaluations.

[0348] Tolerability of modified oligonucleotides is analyzed in brain and spinal cord tissue by measuring Aif1 and Gfap levels in cynomolgus monkeys treated with the modified oligonucleotide or the control. Brain and spinal cord samples are collected and flash frozen in liquid nitrogen and stored frozen (−60° C. to −90° C.). At time of sampling, 2 mm biopsy punches are used to collect samples from frozen tissues for RNA analysis. Punches are taken from multiple brain and spinal cord regions.

### Example 9: Phase Ia Human Clinical Trial with Compound No. 1263789, 1287717, 1287745, or 1358996

[0349] Safety, tolerability, pharmacokinetics, pharmacodynamics and efficacy of modified oligonucleotide complementary to human SMN2 is evaluated in a clinical trial setting. Single and/or multiple doses of modified oligonucleotide are evaluated in patients with confirmed SMA, such as Type I SMA, Type II SMA, Type III SMA, or Type IV SMA.

[0350] Patient safety is monitored closely during the study. Safety and tolerability evaluations include: physical examination and standard neurological assessment (including fundi), vital signs (HR, BP, orthostatic changes, weight), ECG, AEs and concomitant medications, Columbia Suicide Severity Rating Scale (C-SSRS), CSF safety labs (cell counts, protein, glucose), plasma laboratory tests (clinical chemistry, hematology), and urinalysis.

[0351] Efficacy evaluations are selected that are age and Type appropriate and include, for example, the Hammersmith Motor Function Scale—Expanded (HFMSE), which is a reliable and validated tool used to assess motor function in children with SMA; the Pediatric Quality of Life Inventory (PedsQL™) Measurement 4.0 Generic Core Scale; the Pediatric Quality of Life Inventory 3.0 Neuromuscular Modules; the Compound Muscle Action Potential (CMAP); the Motor Unit Number Estimation (MUNE); the Upper Limb Module (ULM); and the 6-Minute Walk Test (6MWT) (Darras, et al., Neurology, 2019, 92: e2492-e2506).

### Example 10: Design of Modified Oligonucleotides Complementary to a Human SMN2 Nucleic Acid

[0352] Modified oligonucleotides complementary to a human SMN2 nucleic acid were designed and synthesized as indicated in the tables below.

[0353] Each modified oligonucleotide listed in the tables below is 100% complementary to SEQ ID NO: 1 (GENBANK Accession No. NT_006713.14 truncated from nucleotides 19939708 to 19967777). “Start site” indicates the 5′-most nucleoside to which the modified oligonucleotide is complementary in the target nucleic acid sequence. “Stop site” indicates the 3′-most nucleoside to which the modified oligonucleotide is complementary in the target nucleic acid sequence.

[0354] The modified oligonucleotides in the table below are 18 nucleosides in length. Each nucleoside comprises either a 2′-MOE sugar moiety or a 2′-NMA sugar moiety. The sugar motif for each modified oligonucleotide is provided in the Sugar Motif column, wherein each ‘e’ represents a 2′-MOE sugar moiety, and each ‘n’ represents a 2′-NMA sugar moiety. Each internucleoside linkage is either a phosphorothioate internucleoside linkage, a phosphodiester internucleoside linkage, a methoxypropyl phosphonate internucleoside linkage, or a mesyl phosphoramidate (MsP) internucleoside linkage. The internucleoside linkage motif for each modified oligonucleotide, is provided in the Internucleoside Linkage Motif column, wherein each ‘s’ represents a phosphorothioate internucleoside linkage, each ‘o’ represents a phosphodiester internucleoside linkage, each ‘x’ represents a methoxypropyl phosphonate internucleoside linkage, and each ‘z’ represents a mesyl phosphoramidate (MsP) internucleoside linkage. Each cytosine is a 5-methyl cytosine. Modified oligonucleotide 449320 has been previously described in WO2015/161170 A2.

TABLE 51
MOE and NMA modified oligonucleotides with mixed PO/PS, PO/MsP,
uniform MsP, or PS/MOP internucleoside linkages

| | | | | SEQ ID | SEQ ID | |
|---|---|---|---|---|---|---|
| | | | Internucleoside | No: 1 | No: 1 | SEQ |
| Compound | | Sugar Motif | Linkage Motif | Start | Stop | ID |
| Number | Sequence (5′ to 3′) | (5′ to 3′) | (5′ to 3′) | Site | Site | No. |
| 449320 | TCACTTTCATAATGCTGG | eeeeeeeeeeeeeeeeee | ssoooooooooooooss | 27062 | 27079 | 23 |
| 1287723 | TCACTTTCATAATGCTGG | nnnnnnnnnnnnnnnenn | sssssssssssssssxs | 27062 | 27079 | 23 |
| 1287724 | TCACTTTCATAATGCTGG | nnnnnnnnnnnnnnnnen | ssssssssssssssssx | 27062 | 27079 | 23 |
| 1287727 | CACTTTCATAATGCTGGC | nnnnnnnnnnnnnnnnen | ssssssssssssssssx | 27061 | 27078 | 21 |
| 1405549 | TCACTTTCATAATGCTGG | eeeeeeeeeeeeeeeeee | zzzzzzzzzzzzzzzzz | 27062 | 27079 | 23 |
| 1405552 | TCACTTTCATAATGCTGG | eeeeeeeeeeeeeeeeee | ssssssssssszzzzzz | 27062 | 27079 | 23 |
| 1405553 | TCACTTTCATAATGCTGG | eeeeeeeeeeeeeeeeee | ssssszzzzzzssssss | 27062 | 27079 | 23 |
| 1545359 | TCACTTTCATAATGCTGG | nnnnnnnnnnnnnnnnnn | ssoooooooooooooss | 27062 | 27079 | 23 |
| 1547773 | TCACTTTCATAATGCTGG | eeeeeeeeeeeeeeeeee | zzooooooooooooozz | 27062 | 27079 | 23 |
| 1549028 | TCACTTTCATAATGCTGG | eeeeeeeeeeeeeeeeee | zzzzooooooooooozz | 27062 | 27079 | 23 |
| 1549029 | TCACTTTCATAATGCTGG | eeeeeeeeeeeeeeeeee | zzzzzzooooooooozz | 27062 | 27079 | 23 |
| 1549030 | TCACTTTCATAATGCTGG | eeeeeeeeeeeeeeeeee | zzzzzzzzooooooozz | 27062 | 27079 | 23 |

[0355] The modified oligonucleotides in the table below all consist of the sequence (from 5′ to 3′): TCACTTTCATAATGCTGG (SEQ ID NO: 23). Each modified oligonucleotide listed in the tables below is 100% complementary to SEQ ID NO: 1 (described herein above). “Start site” indicates the 5′-most nucleoside to which the modified oligonucleotide is complementary in the target nucleic acid sequence. “Stop site” indicates the 3′-most nucleoside to which the modified oligonucleotide is complementary in the target nucleic acid sequence. The modified oligonucleotides in the table below are 18 nucleosides in length. Each nucleoside comprises either a 2′-MOE sugar moiety or a 2′-NMA sugar moiety. The sugar motif for each modified oligonucleotide is provided in the Sugar Motif column, wherein each ‘e’ represents a 2′-MOE sugar moiety, and each ‘n’ represents a 2′-NMA sugar moiety. Each internucleoside linkage is either a phosphorothioate internucleoside linkage, a phosphodiester internucleoside linkage, or a mesyl phosphoramidate (MsP) internucleoside linkage. The internucleoside linkage motif for each modified oligonucleotide, is provided in the Internucleoside Linkage Motif column, wherein each ‘s’ represents a phosphorothioate internucleoside linkage, each ‘o’ represents a phosphodiester internucleoside linkage, and each ‘z’ represents a mesyl phosphoramidate (MsP) internucleoside linkage. Each cytosine is a 5-methyl cytosine. The modified oligonucleotides in the table below are conjugated to a 6-palmitamidohexyl phosphate conjugate group attached to the 5′-OH of the oligonucleotide. The structure for the conjugate group is:

[chemical structure]

TABLE 52
6-palmitamidohexyl conjugated MOE and NMA modified
oligonucleotides with mixed PO/PS, PO/MsP,
or uniform MsP internucleoside linkages

| | | | SEQ ID | SEQ ID | |
|---|---|---|---|---|---|
| | | Internucleoside | No: 1 | No: 1 | |
| Compound | Sugar Motif | Linkage Motif | Start | Stop | SEQ ID |
| Number | (5′ to 3′) | (5′ to 3′) | Site | Site | No. |
| 1545361 | eeeeeeeeeeeeeeeeee | ssoooooooooooooss | 27062 | 27079 | 23 |
| 1545362 | nnnnnnnnnnnnnnnnnn | ssoooooooooooooss | 27062 | 27079 | 23 |
| 1547772 | eeeeeeeeeeeeeeeeee | zzzzzzzzzzzzzzzzz | 27062 | 27079 | 23 |
| 1547774 | eeeeeeeeeeeeeeeeee | zzooooooooooooozz | 27062 | 27079 | 23 |
| 1549031 | eeeeeeeeeeeeeeeeee | zzzzooooooooooozz | 27062 | 27079 | 23 |
| 1549032 | eeeeeeeeeeeeeeeeee | zzzzzzooooooooozz | 27062 | 27079 | 23 |
| 1549033 | eeeeeeeeeeeeeeeeee | zzzzzzzzooooooozz | 27062 | 27079 | 23 |

[0356] The modified oligonucleotides in the table below all consist of the sequence (from 5′ to 3′): TCACTTTCATAATGCTGG (SEQ ID NO: 23), with a start site of 27062, and a stop site of 27079 on SEQ ID No: 1 (described herein above), wherein “start site” indicates the 5′-most nucleoside to which the modified oligonucleotide is complementary in the target nucleic acid sequence, and wherein “stop site” indicates the 3′-most nucleoside to which the modified oligonucleotide is complementary in the target nucleic acid sequence.

[0357] The modified oligonucleotides in the table below are 18 nucleosides in length. The sugar and internucleoside linkage motifs for each modified oligonucleotide are provided in the Sequence and Chemistry Notation column, wherein each subscript ‘n’ represents a 2′-NMA sugar moiety, each subscript ‘[DMA]’ represents a 2′-O—(N,N-dimethyl) acetamide moiety, each subscript ‘[NEA]’ represents a 2′-O-(N-ethyl) acetamide moiety, each subscript ‘[NPA]’ represents a 2′-O-(N-propyl) acetamide moiety, each subscript ‘[NcPA]’ represents a 2′O-(N-cyclopropyl) acetamide moiety, each subscript ‘[McPA]’ represents a 2′-O-(N-cyclopropylmethyl) acetamide moiety, and each subscript ‘s’ represents a phosphorothioate internucleoside linkage. Each cytosine is a 5-methyl cytosine, wherein the superscript ‘m’ before the cytosine residue (^{m}C) represents a 5-methyl cytosine. The structures for each of the sugars represented in the table below are:

[chemical structure]

TABLE 53
NMA and NMA analog modified oligonucleotides with uniform PS internucleoside linkages

| Compound | | SEQ |
|---|---|---|
| Number | Sequence and Chemistry Notation (5′ to 3′) | ID No. |
| 1355763 | T_{[DMA]s}^{m}C_{[DMA]s}Aₙₛ^{m}C_{[DMA]s}T_{[DMA]s}T_{[DMA]s}^{m}C_{[DMA]s}AₙₛT_{[DMA]s}AₙₛAₙₛT_{[DMA]s}Gₙₛ^{m}C_{[DMA]s}T_{[DMA]s}GₙₛGₙ | 23 |
| 1359463 | T_{[NEA]s}^{m}C_{[NEA]s}Aₙₛ^{m}C_{[NEA]s}T_{[NEA]s}T_{[NEA]s}T_{[NEA]s}^{m}C_{[NEA]s}AₙₛT_{[NEA]s}AₙₛAₙₛT_{[NEA]s}Gₙₛ^{m}C_{[NEA]s}T_{[NEA]s}GₙₛGₙ | 23 |
| 1358995 | T_{[NPA]s}^{m}C_{[NPA]s}Aₙₛ^{m}C_{[NPA]s}T_{[NPA]s}T_{[NPA]s}T_{[NPA]s}^{m}C_{[NPA]s}AₙₛT_{[NPA]s}AₙₛAₙₛT_{[NPA]s}Gₙₛ^{m}C_{[NpA]s}T_{[NpA]s}GₙₛGₙ | 23 |
| 1355776 | T_{[NcPA]s}^{m}C_{[NcPA]s}Aₙₛ^{m}C_{[NcPA]s}T_{[NcPA]s}T_{[NcPA]s}T_{[NcPA]s}^{m}C_{[NcPA]s}AₙₛT_{[NcPA]s}AₙₛAₙₛT_{[NcPA]s}Gₙₛ^{m}C_{[NcPA]s}T_{[NcPA]s}GₙₛGₙ | 23 |
| 1355777 | T_{[McPA]s}^{m}C_{[McPA]s}Aₙₛ^{m}C_{[McPA]s}T_{[McPA]s}T_{[McPA]s}T_{[McPA]s}^{m}C_{[McPA]s}AₙₛT_{[McPA]s}AₙₛAₙₛT_{[McPA]s}Gₙₛ^{m}C_{[McPA]s}T_{[McPA]s}GₙₛGₙ | 23 |

### Example 11: Activity of Modified Oligonucleotides Complementary to Human SMN2 in Transgenic Mice, Single Dose (35 μg)

[0358] Activity of selected modified oligonucleotides described above was tested in human SMN2 transgenic mice essentially as described above in Example 2.

### Treatment

[0359] The transgenic mice were divided into groups of 4 mice each. Each mouse received a single ICV bolus of modified oligonucleotide at doses as indicated in the tables below. A group of 4 mice received PBS as a negative control. Two weeks post treatment, mice were sacrificed and RNA was extracted from coronal brain and spinal cord for real-time qPCR analysis of SMN2 RNA. Results are presented as fold change in RNA levels relative to PBS control, normalized to total SMN2 levels. ED₅₀ for exon inclusion (exon 7+) was calculated in GraphPad Prism 7 using nonlinear regression, 4-parameter dose response curve [Y=Bottom+(Top−Bottom)/(1+(10\hat{ }log EC50/X)\hat{ }HillSlope)].

### RNA Analysis

[0360] Two weeks post treatment, mice were sacrificed and RNA was extracted from cortical brain tissue and spinal cord for real-time qPCR analysis of SMN2 RNA. Primer probe set hSMN2vd #4_LTS00216_MGB was used to determine the amount of SMN2 RNA including exon 7 (exon 7+). Primer probe set hSMN2_Sumner68_PPS50481 was used to determine the amount of SMN2 RNA excluding exon 7 (exon 7). Total SMN2 RNA levels were measured using primer probe set hSMN2_LTS00935. Results are presented as fold change in RNA levels relative to PBS control, normalized to total SMN2 levels.

TABLE 54
Effect of modified oligonucleotides on human SMN2
RNA splicing in heterozygous transgenic mice

| Compound | Dose | CORTEX | | SPINAL CORD | |
|---|---|---|---|---|---|
| No. | (μg) | exon 7⁺ | exon 7⁻ | exon 7⁺ | exon 7⁻ |
| PBS | — | 1 | 1 | 1 | 1 |
| 396443 | 35 | 3 | 0.6 | 3 | 0.5 |
| 1405549 | 35 | 1.6 | 0.9 | 1.2 | 0.9 |
| 1405552 | 35 | 3.2 | 0.6 | 2.1 | 0.7 |
| 1405553 | 35 | 2.4 | 0.7 | 1.7 | 0.8 |

TABLE 55
Effect of modified oligonucleotides on human SMN2 RNA
splicing in heterozygous transgenic mice

| Compound | Dose | CORTEX | | SPINAL CORD | |
|---|---|---|---|---|---|
| No. | (μg) | exon 7⁺ | exon 7⁻ | exon 7⁺ | exon 7⁻ |
| PBS | — | 1 | 1 | 1 | N/A |
| 396443 | 35 | 2.7 | 0.5 | 3 | N/A |
| 1405549 | 35 | 1.5 | 0.8 | 1.9 | N/A |
| 1547772 | 35 | 1.8 | 0.8 | 1.8 | N/A |
| 1547773 | 35 | 1.6 | 0.9 | 1.9 | N/A |
| 1547774 | 35 | 1.6 | 1 | 1.6 | N/A |
| 1549028 | 35 | 1.5 | 1 | 1.5 | N/A |
| 1549029 | 35 | 1.4 | 1 | 1.7 | N/A |
| 1549030 | 35 | 1.4 | 1 | 1.4 | N/A |
| 1549031 | 35 | 1.7 | 0.8 | 1.6 | N/A |
| 1549032 | 35 | 1.4† | 0.9† | 1.7† | N/A |
| 1549033 | 35 | 1.4 | 1 | 1.3 | N/A |

†indicates fewer than four samples available

### Example 12: Activity of Modified Oligonucleotides Complementary to Human SMN2 in Transgenic Mice, Single Dose (15 μg)

[0361] Activity of selected modified oligonucleotides described above was tested in human SMN2 transgenic mice essentially as described above in Example 2.

### Treatment

[0362] The transgenic mice were divided into groups of 4 mice each. Each mouse received a single ICV bolus of modified oligonucleotide at doses as indicated in the tables below. A group of 4 mice received PBS as a negative control. Two weeks post treatment, mice were sacrificed and RNA was extracted from coronal brain and spinal cord for real-time qPCR analysis of SMN2 RNA. Results are presented as fold change in RNA levels relative to PBS control, normalized to total SMN2 levels. ED₅₀ for exon inclusion (exon 7+) was calculated in GraphPad Prism 7 using nonlinear regression, 4-parameter dose response curve [Y=Bottom+(Top−Bottom)/(1+(10\hat{ }log EC50/X)\hat{ }HillSlope)].

### RNA Analysis

[0363] Two weeks post treatment, mice were sacrificed and RNA was extracted from cortical brain tissue and spinal cord for real-time qPCR analysis of SMN2 RNA. Primer probe set hSMN2vd #4_LTS00216_MGB was used to determine the amount of SMN2 RNA including exon 7 (exon 7⁺). Primer probe set hSMN2_Sumner68_PPS50481 was used to determine the amount of SMN2 RNA excluding exon 7 (exon 7⁻). Total SMN2 RNA levels were measured using primer probe set hSMN2_LTS00935. Results are presented as fold change in RNA levels relative to PBS control, normalized to total SMN2 levels.

TABLE 56
Effect of modified oligonucleotides on human SMN2
RNA splicing in heterozygous transgenic mice

| Compound | Dose | CORTEX | | SPINAL CORD | |
|---|---|---|---|---|---|
| No. | (μg) | exon 7⁺ | exon 7⁻ | exon 7⁺ | exon 7⁻ |
| PBS | — | 1 | 1 | 1 | 1 |
| 443305 | 15 | 3.4 | 0.4 | 3.3 | 0.3 |
| 1287723 | 15 | 3.9 | 0.3 | 3.3 | 0.3 |
| 1287724 | 15 | 4.2 | 0.2 | 3.7 | 0.2 |
| 1287727 | 15 | 4.5 | 0.2 | 3.4 | 0.2 |

### Example 13: Activity of Modified Oligonucleotides Complementary to Human SMN2 in Transgenic Mice, Multiple Dose

[0364] Activity of selected modified oligonucleotides described above was tested in human SMN2 transgenic mice essentially as described above in Example 2.

### Treatment

[0365] The transgenic mice were divided into groups of 4 mice each. Each mouse received a single ICV bolus of modified oligonucleotide at multiple doses as indicated in the tables below. A group of 4 mice received PBS as a negative control. Two weeks post treatment, mice were sacrificed and RNA was extracted from coronal brain and spinal cord for real-time qPCR analysis of SMN2 RNA. Results are presented as fold change in RNA levels relative to PBS control, normalized to total SMN2 levels. ED₅₀ for exon inclusion (exon 7+) was calculated in GraphPad Prism 7 using nonlinear regression, 4-parameter dose response curve [Y=Bottom+(Top−Bottom)/(1+(10\hat{ }log EC50/X)\hat{ }HillSlope)].

### RNA Analysis

[0366] Two weeks post treatment, mice were sacrificed and RNA was extracted from cortical brain tissue and spinal cord for real-time qPCR analysis of SMN2 RNA. Primer probe set hSMN2vd #4_LTS00216_MGB was used to determine the amount of SMN2 RNA including exon 7 (exon 7+). Primer probe set hSMN2_Sumner68_PPS50481 was used to determine the amount of SMN2 RNA excluding exon 7 (exon 7). Total SMN2 RNA levels were measured using primer probe set hSMN2_LTS00935. Results are presented as fold change in RNA levels relative to PBS control, normalized to total SMN2 levels.

TABLE 57
Effect of modified oligonucleotides on human
SMN2 RNA splicing in heterozygous transgenic mice

| Compound | Dose | CORTEX | | ED50 | SPINAL CORD | | ED50 |
|---|---|---|---|---|---|---|---|
| No. | (μg) | exon 7+ | exon 7− | (μg) | exon 7+ | exon 7− | (μg) |
| PBS | — | 1 | 1 | — | 1 | 1 | — |
| 396443 | 10 | 2.1 | 0.7 | 26 | 1.9 | 0.8 | 22 |
| | 30 | 2.8 | 0.5 | | 2.6 | 0.7 | |
| | 100 | 3.2 | 0.3 | | 2.8 | 0.4 | |
| 449320 | 10 | 1.2 | 1.0 | >100 | 1.2 | 1.2 | >100 |
| | 30 | 1.5 | 1.0 | | 1.3 | 1.2 | |
| | 100 | 1.5 | 0.9 | | 1.3 | 0.9 | |
| 1545361 | 10 | 1.4 | 1.0 | >100 | 1.2 | 1.1 | >100 |
| | 30 | 1.8 | 1.1 | | 1.6 | 1.3 | |
| | 100 | 1.3 | 0.9 | | 1.4 | 0.9 | |
| 443305 | 10 | 2.4 | 0.6 | 14 | 2.6 | 0.5 | 9 |
| | 30 | 3.5 | 0.3 | | 3.0 | 0.4 | |
| | 100 | 3.7 | 0.1 | | 3.3 | 0.1 | |
| 1545359 | 10 | 1.4 | 1.0 | >100 | 1.4 | 1.1 | >100 |
| | 30 | 2.0 | 0.9 | | 1.7 | 1.1 | |
| | 100 | 2.3 | 0.6 | | 1.7 | 0.8 | |
| 1545362 | 10 | 1.4 | 0.9 | 95 | 1.3 | 1.1 | 51 |
| | 30 | 1.9 | 0.8 | | 2.4 | 1.0 | |
| | 100 | 2.7 | 0.5 | | 2.6 | 0.6 | |

TABLE 58
Effect of modified oligonucleotides on human
SMN2 RNA splicing in heterozygous transgenic mice

| Compound | Dose | CORTEX | | ED50 | SPINAL CORD | | ED50 |
|---|---|---|---|---|---|---|---|
| No. | (μg) | exon 7+ | exon 7− | (μg) | exon 7+ | exon 7− | (μg) |
| PBS | — | 1 | 1 | — | 1 | 1 | — |
| 1263789 | 3 | 1.5 | 0.9 | 35 | 1.6 | 0.8 | 16 |
| | 10 | 1.9 | 0.8 | | 2.2 | 0.6 | |
| | 30 | 2.7 | 0.6 | | 2.9 | 0.5 | |
| | 100 | 3.8 | 0.3 | | 3.5 | 0.3 | |
| | 300 | 4.3 | 0.2 | | 3.9 | 0.2 | |
| 1287703 | 3 | 1.5 | 0.7 | 43 | 1.5 | 0.8 | 28 |
| | 10 | 1.6 | 0.7 | | 2.0 | 0.7 | |
| | 30 | 2.7 | 0.5 | | 2.6 | 0.5 | |
| | 100 | 3.7 | 0.3 | | 3.2 | 0.4 | |
| | 300 | 4.0 | 0.2 | | 3.5 | 0.2 | |
| 1287717 | 3 | 1.4 | 0.8 | 31 | 1.4 | 0.9 | 30 |
| | 10 | 1.7 | 0.7 | | 1.8 | 0.7 | |
| | 30 | 3.1 | 0.4 | | 2.4† | 0.5† | |
| | 100 | 3.8 | 0.3 | | 3.3 | 0.3 | |
| | 300 | 4.3 | 0.2 | | 3.8 | 0.2 | |
| 1318768 | 3 | 1.3 | 0.8 | 49 | 1.2 | 0.8 | 32 |
| | 10 | 1.8 | 0.7 | | 1.8 | 0.8 | |
| | 30 | 2.4 | 0.6 | | 2.4 | 0.6 | |
| | 100 | 3.5 | 0.3 | | 3.3 | 0.4 | |
| | 300 | 4.1 | 0.2 | | 3.9 | 0.2 | |
| 1287731 | 3 | 1.5 | 0.8 | 29 | 1.5 | 1.0 | 13 |
| | 10 | 2.0 | 0.6 | | 2.4 | 0.6 | |
| | 30 | 2.7 | 0.4 | | 3.2 | 0.4 | |
| | 100 | 4.3 | 0.2 | | 3.8 | 0.2 | |
| | 300 | 4.2 | 0.1 | | 3.7 | 0.1 | |
| 1287735 | 3 | 1.7 | 0.7 | 22 | 1.5 | 0.8 | 15 |
| | 10 | 2.4 | 0.6 | | 2.2 | 0.6 | |
| | 30 | 3.0 | 0.3 | | 3.1 | 0.3 | |
| | 100 | 4.0 | 0.2 | | 3.5 | 0.2 | |
| | 300 | 4.2 | 0.1 | | 3.9 | 0.1 | |
| 1287745 | 3 | 1.5 | 0.7 | 35 | 1.4 | 0.8 | 13 |
| | 10 | 2.0 | 0.6 | | 2.4 | 0.6 | |
| | 30 | 2.9 | 0.4 | | 3.2 | 0.4 | |
| | 100 | 3.7 | 0.2 | | 3.6 | 0.2 | |
| | 300 | 3.7 | 0.2 | | 3.8 | 0.2 | |
| 396443 | 3 | 1.7 | 0.7 | 47 | 1.5 | 0.9 | 22 |
| | 10 | 1.4 | 0.7 | | 1.6 | 0.8 | |
| | 30 | 2.8 | 0.5 | | 3.1 | 0.4 | |
| | 100 | 3.3 | 0.4 | | 3.3 | 0.5 | |
| | 300 | 4.3 | 0.2 | | 4.0 | 0.2 | |

†indicates fewer than four samples available

TABLE 59
Effect of modified oligonucleotides on human
SMN2 RNA splicing in heterozygous transgenic mice

| Compound | Dose | CORTEX | | ED50 | SPINAL CORD | | ED50 |
|---|---|---|---|---|---|---|---|
| No. | (μg) | exon 7+ | exon 7− | (μg) | exon 7+ | exon 7− | (μg) |
| PBS | — | 1 | 1 | — | 1 | 1 | — |
| 396443 | 3 | 1.1 | 0.9 | 39 | 1.2 | 0.9 | 33 |
| | 30 | 2.0 | 0.6 | | 2.3 | 0.5 | |
| | 100 | 2.3 | 0.4 | | 2.7 | 0.3 | |
| 443305 | 3 | 1.4 | 0.7 | 13 | 1.6 | 0.7 | 10 |
| | 30 | 2.4 | 0.3 | | 3.0 | 0.2 | |
| | 100 | 2.9 | 0.2 | | 3.1 | 0.2 | |
| 1355763 | 3 | 1.1 | 0.8 | 54 | 1.1 | 0.8 | 45 |
| | 30 | 1.7 | 0.6 | | 2.1 | 0.5 | |
| | 100 | 2.4 | 0.4 | | 2.6 | 0.3 | |
| 1359463 | 3 | 1.3 | 0.8 | 18 | 1.3 | 0.7 | 19 |
| | 30 | 2.3 | 0.3 | | 2.7 | 0.3 | |
| | 100 | 2.9 | 0.2 | | 2.7 | 0.2 | |
| 1358995 | 3 | 1.2 | 0.8 | 45 | 1.0 | 0.8 | 59 |
| | 30 | 2.0 | 0.4 | | 1.8 | 0.4 | |
| | 100 | 2.2 | 0.4 | | 2.6 | 0.3 | |
| 1355776 | 3 | 1.1 | 0.8 | 25 | 1.3 | 0.7 | 24 |
| | 30 | 2.2 | 0.4 | | 2.4 | 0.4 | |
| | 100 | 2.6 | 0.3 | | 2.9 | 0.3 | |
| 1355777 | 3 | 1.0 | 0.9 | 107 | 0.9 | 0.9 | 72 |
| | 30 | 1.6 | 0.7 | | 1.8 | 0.6 | |
| | 100 | 1.7 | 0.5 | | 2.2 | 0.6 | |

### Example 15: Tolerability of Modified Oligonucleotides Complementary to SMN2 in Wild-Type Mice

[0367] Modified oligonucleotides described above were tested in wild-type female C57/B16 mice to assess the tolerability of the oligonucleotides. Wild-type female C57/B16 mice each received a single ICV dose of 700 μg of modified oligonucleotide listed in the table below. Each treatment group consisted of 4 mice. A group of 4 mice received PBS as a negative control for each experiment (identified in separate tables below). At 3 hours post-injection, mice were evaluated according to seven different criteria. The criteria are (1) the mouse was bright, alert, and responsive; (2) the mouse was standing or hunched without stimuli; (3) the mouse showed any movement without stimuli; (4) the mouse demonstrated forward movement after it was lifted; (5) the mouse demonstrated any movement after it was lifted; (6) the mouse responded to tail pinching; (7) regular breathing. For each of the 7 criteria, a mouse was given a subscore of 0 if it met the criteria and 1 if it did not (the functional observational battery score or FOB). After all 7 criteria were evaluated, the scores were summed for each mouse and averaged within each treatment group. The results are presented in the tables below.

TABLE 60
Tolerability scores in
mice at 700 μg dose

| Compound | 3 hr |
|---|---|
| Number | FOB |
| PBS | 0.00 |
| 1287723 | 2.00 |
| 1287724 | 1.00 |
| 1287727 | 2.00 |

1.-31. (canceled)

32. A modified oligonucleotide according to the following chemical structure: [chemical structure]
or a salt thereof.

33. A modified oligonucleotide according to the following chemical structure:

[chemical structure]

34. A modified oligonucleotide according to the following chemical notation: ^{m}Cₙₛ Aₙₒ ^{m}Cₙₛ Tₙₒ Tₙₛ Tₙₛ ^{m}Cₙₛ Aₙₛ Tₙₛ Aₙₛ Aₙₛ Tₙₛ Gₙₛ ^{m}Cₙₛ Tₙₛ Gₙₛ Gₙₛ ^{m}Cₙ (SEQ ID NO: 52), wherein:
A=an adenine nucleobase,
^{m}C=a 5-methyl cytosine nucleobase,
G=a guanine nucleobase,
T=a thymine nucleobase,
n=a 2′-NMA sugar moiety,
s=a phosphorothioate internucleoside linkage, and
o=a phosphodiester internucleoside linkage.

35. A chirally enriched population of modified oligonucleotides of claim 32, wherein the population is enriched for modified oligonucleotides comprising at least one particular phosphorothioate internucleoside linkage having a particular stereochemical configuration.

36. A chirally enriched population of modified oligonucleotides of claim 33, wherein the population is enriched for modified oligonucleotides comprising at least one particular phosphorothioate internucleoside linkage having a particular stereochemical configuration.

37. A chirally enriched population of modified oligonucleotides of claim 34, wherein the population is enriched for modified oligonucleotides comprising at least one particular phosphorothioate internucleoside linkage having a particular stereochemical configuration.

38. A pharmaceutical composition comprising the modified oligonucleotide of claim 32, and a pharmaceutically acceptable diluent or carrier.

39. A pharmaceutical composition comprising the modified oligonucleotide of claim 33, and a pharmaceutically acceptable diluent or carrier.

40. A pharmaceutical composition comprising the modified oligonucleotide of claim 34, and a pharmaceutically acceptable diluent or carrier.

41. A pharmaceutical composition comprising the population of modified oligonucleotides of claim 35, and a pharmaceutically acceptable diluent or carrier.

42. A pharmaceutical composition comprising the population of modified oligonucleotides of claim 36, and a pharmaceutically acceptable diluent or carrier.

43. A pharmaceutical composition comprising the population of modified oligonucleotides of claim 37, and a pharmaceutically acceptable diluent or carrier.

44. A method of treating spinal muscular atrophy (SMA) comprising administering to a human subject in need thereof a therapeutically effective amount of a pharmaceutical composition comprising the modified oligonucleotide of claim 32.

45. A method of treating spinal muscular atrophy (SMA) comprising administering to a human subject in need thereof a therapeutically effective amount of a pharmaceutical composition comprising the modified oligonucleotide of claim 33.

46. A method of treating spinal muscular atrophy (SMA) comprising administering to a human subject in need thereof a therapeutically effective amount of a pharmaceutical composition comprising the modified oligonucleotide of claim 34.

47. A method of increasing SMN2 RNA including exon 7 comprising contacting a cell, tissue, or organ with the modified oligonucleotide of claim 32.

48. A method of increasing SMN2 RNA including exon 7 comprising contacting a cell, tissue, or organ with the modified oligonucleotide of claim 33.

49. A method of increasing SMN2 RNA including exon 7 comprising contacting a cell, tissue, or organ with the modified oligonucleotide of claim 34.

The application's sequence listing, which the Patent Office published only in electronic form, follows.

SEQUENCE LISTING (355 sequences)

SEQ ID NO: 1 - DNA, 28070 bp, Homo sapiens
  source 1..28070: mol_type = unassigned DNA
ccacaaatgtgggagggcgataaccactcgtagaaagcgtgagaagttactacaagcggtcctcccggccaccgtactgttccgctcccagaagccccgggcggcggaagtcgtcactcttaagaagggacggggccccacgctgcgcacccgcgggtttgctatggcgatgagcagcggcggcagtggtggcggcgtcccggagcaggaggattccgtgctgttccggcgcggcacaggccaggtgaggtcgcagccagtgcagtctccctattagcgctctcagcacccttcttccggcccaactctccttccgcagcctcgggacagcatcaagtcgatccgctcactggagttgtggtccgcgtttttctacgtcttttcccactccgttccctgcgaaccacatccgcaagctccttcctcgagcagtttgggctccttgatagcgttgagtggaggccctgccgcgacttggcagtagcttattttgttcactcctctctggctggtgtgggggaggtgggggcattaggccagggtgaagcaggggaaccacttaggagtctgttaagatgatctgaacttcagaacaagatgttattaacagagtgaaagtatttggattctgggtatattttgaaatcggaggcaacaggtttttcagatagattcgataacggaggttatcctgaatagttgaaaagataaagttgccttttgctgaggtgggaaagagaagattgccagtagagcaggtttctcaggagttcagtcttgggcatagcatggtaggggtgaatttggctggagtgagttggagagtaggagaagagaaatccaaggcaacatttgaccagcctgggcaacatagtgtgactccgagtctgcaaaaattagacgggtgttgtggtgcgcgtctgtggtctcagctacctggaaggttcaggccttggaaggctcagggaggtggaggctgcagtgatctgtgattgcgcctctgcactccagcctgggcgacagagccagaccctgtcttaaaacaaaataaacggccgggcgcggtggctcaagcctgtaatcccagcactttgggaggccgaggcggccggatcacaaggtcaggagatcgagaccatcctggctaacacggtgaaaccccgtctctactacaaatacaaaaaattagccgggcgtggtgacgggcgcctgtagtcccagctactcgggaggctgaggcaggagaatgtcatgaagccgggaggcggagcttgcagtgagccgagatcgcgccactgcactccagcctgggcgatagagcaagactccgtctcaaataaataaataaataaataaataaataataaaaacatcggtaggcatatttcaaggaattctatttaaaaaaaatttttttagagacaagttcgctctctgtggcccaggctggagtacagtggcatgatcctagcccatggcagcgttgatctcttggcctcaagcgaccctcctttggagtcgctgggcctaaaggagtgagccaccacgaaattttattataaatggagggtagagaaattgggcaataaatggagggggaagtgagttaagaggaattttaattatgtgtgtgtggttttaaaagaggggggtcttgctctgttgcccaggctgctggggtgccagtggcgcaatcatgaatcactacagccttggactcctggcctcaagctatcctcccacctctgcctcccaaagtactgggattactagtgtgagccactgcactaagataggagcaacatgtttcagcatgtttgtgggttgataggaaagatgagaatgggaaagttgatgtcggaaagaagacaatggctagagcaatgtcctagagtaggtaagaagggatggatttggcctttgttggaaacattagcggttcttttggtgacagctatatagttaacacatctatgatacgtgaatgggcagataggatggcaggagattttgaaagttctcttgattcttactgttctcttagtgaaagaagcaaggttatcagctagaagctgggatgggagaggaaagagaagatgggaagtagatagttctttagaagagtgggcaagggttggactagggaagtttagtggaaatattgctaggcaacataaagagcctacttgagattcgtggtcatgagttgaaggagaccagacagcaagattgtgtatgagggcacccacagagtaaatggagagttgaaattaatgcagttgtgattttaccacgtggatatgaagaagtgagggggagaagtacaaaggagttctcttaatgattgaccatggaatttaagctggctaagaaaggaagtgagaggccgggcgcggtggctcacgcctgtaatcccagcactttgggagactgaggtgggtggattacctgaggtcaggagtttgagaccaacctggccgatatggcgaaaccccatctctaataaaaatacagaaaaattagccgggaatggtggcaggtgcctgtaatcccagctactcaagaggctgtggcaggagtatcccttggacccaggaggtggaggttgcagtgagccgagatcacgccactgtactccagcctggacgatatagtgagacttcacctcaaaaaaaaaaaaaaagaaaggaagtgaggattttaagaccctgagagacagtttaaaaagtgggaggatcggccgggcgctgtggctgacacctgtaatcccagcactttgggaggccgagttgggcagatcacaaggtcaggagttcgagaccagcctggccaatatggtgaaaccttgtctctactaaaaatacaaaaattagccgggcatggtgtcacgtgtctataatcccagctactcgggaggctgaggcagaaaaattgcttgaacctgggaggcagaggttgcagacagctgagatcactccattgcactccagcctgggcaacaagagcaaaactttgtctttaaaaaaaaaaaaaaaaaaagaatacaaaaattagccgggcgtggtggcgcgtgcctataatcccagctacttgggaggctgaggcaggagaatcagttgaacacgggaggcgaggtttgcagtgagccgagattgcgccactgcactccagcctgggcgacagagcaggactcctcttggaaaaaaaaaattagctgggcatggtggcaggtgcctgtagtctcagctactagggaggctgaggcaggaaaatcacttgaacccgggatgtggagtttgcagtgacccgagatcgtgccactgtactccatcctgggcgacaaaatgagactctgcctcaaaaaaaaaaaaaaaaaaaagtgggaggatcaatgtactgccagtcctaatgaagtggaatgattgtccccatcaaatcactagtaggagtaagttgcagagcctagaaggtgatggttaagagagtgggattcttgaaactgcatttatggagaggttgtggttattggttataataaataaatacagttgaagtgagtgagtagctgagatttggggatgtatcagttcattcttacactgctacaaagacatacctgagaccaggtatttataaagataagaggtttaatcagctcacagttctgctgcctgtacaggcttctcttgtggaggcctaaggaaacttacagtcatggtggaaggtgaaggggaaacaagcacagtcttcacatggccagcaggagagagagagaagggggaagtgctacatactttaaaacaaccagatcttgtgagaacgcttatcaggaaacagcacttggggatggtgctaaatcattagaaatcacccccatgatccagtcgcctcctaccatgcccacctccaacactggggatcacaattcagcatgagatttgggtaggaacacagagctgcaccacatcagaggatgtacaagattgtggtggagaggagtttagagacctgcaaatatagggtaattgaagggatcatctacatggatatttaaatcaccaaaaattatgacaggagtagtgttggagagagaactgcgatgtaaacattaaggaatgaggaagagtgactcggtaggctgtaggtgactgcaataggaaacgataatagactgtgagtctggtgacaagattttccttctttctttttttccccccccccgagacagggcctctttttgttgcccaggtgggagtgcagtggcgcgatcacggctcactacaacctcctcccaagctcaagggattctcccacttcagcctctcaagtagctggaactacaggtgctgaccaccatgcctggctactttttgtcaggattttcaaggctgggaattttgagaggggaatggaggagaataatctgaaagtgcaagtaaggagcagggaagatttcttttttcttttttttttttttttttgagtcggagtctggctcagtcgcccaggctggagtgcagtggcgagatctccgctcactgcaagctccgcctcccgtgttcacgccattctcctccttcagcctcccgagtagctgggactacaggcgcccgccaccacgcccagctaattgtttttttgtatttttagtagagacggggtttcaccgtgttagccaggatggtctcaatctcctgactttgtgatccgcccaccccggcctcccaaagcgcttgggattacaggcgtgagccaccgcgccagccagagcagggaagatttcttccccacatctccagtaggtacagtgatatgaagtgtgtggaggagaaaagaggaaacatctatcatttgagatggctgcgaaaggaaaaggcatcctcagggagctagattttacttagagcaagaaatgaagggatgattcagaggttaaaagagtggattttatgaattactcaagggagcacagtggaagtttcaggaagtggtaggagaaggtagaagatggcagggtgttgggaataatttgagaaatctgagctactggaaatgactgagaatcagatataaaggcagtcctggtggtccgttctggctgccgttgctgtgtaacgaatctgccaaaacttagtggcttgaaacaacaaagaacattttattatctctcattgtttctgtgggttaggaatttgtgagagccgtgctgggcagttttcgtgcggctgtctcgtggttgcacctacatagttgctagagctacagtagctggggactgagcagctagggattggcaggctatctctttttttcatgtagtctcatgaagatttctttatgtggtttcaatgtgtgggctggtttggatttccttatagcatggtggcctcagttggattgctgttttgtgatccttttcatccctccttgtcctgtccccagacaaccactgatctactttctgtcaccatagattagcctgcatttttaagaatttttataaacgtggaatgatagagtaccttttttgtcacgtttcttttatttatcatagctattttgattttcatccattttattgctgagtagtatcccattgcatgtatatactatactgtattcattcgcttgcttgtgaacatttgggctttttccagtttgggactgttaacaagtagagccactatgaatattagtgtataagacttcatatagccaaggctggcagatcgcttgagcccaggagtttgagaccagcctgggaaacatggtgaaacctctatttttattttaaaatcaaaaattaaaaattttctataaaaaattttaaagaagactttgtatagacatacgctttcatttttcttgagtgaatacttaggtctcagggtagatgtattttaagtctttaaggagctgtcaaactcttcctcaaagtggtggttgtaccatgttactttttaatataacagagattaattgagcaaagaaaaattcaaaagttggacagcccccacaactaaataggttcagaacagctcccccattttgcattttgaccagcaatgtatgaaagttccatttgctcagtgtccctgcaaacacctggtatggtcagtctttttaattttaggcattataatagatatagtggcttcttgtgattttaattagcatttcctaatgaccagtgctgctgttgatcatttcatgagtgtatttgccatccgtatatcttttttggtgaagtgtctattcaaatcatttgggttttttttttttttgttttttttttttggagacagtgtctcactctgtcacccaggctgttgtgcagtggtgcaatcacacagcctactgcagcctccacctcctgcgctcagtcttcttgtctcagccttctgagtagctgaaattacgagcacacgccacaatgcctggctaattttttaaaattttgtagaaacaaggtctcattatgttgcctgggcttgtcgtgaactcctgggctcaagcaatcttcctgcctcagcctcccaaagattgggattgcaagtatgagccactgcacccggccaacttacccatcttttaattgaatttttttgttgttgaggtttgagagttcttcatgtttgctgggtacaatatctttatcagataggtaacttgcatgtattttctcccggtttacactttggtttttcattttgttaacaacgtctttttaagaacagaaaatcttaattttgctgaaatctaatttttcagttttttctttgatggttttgagagaggaggtaaaaaaagactaggtaagccgatagttagacagagtcctcggtagaacttcccttctaacaaaaagcagcccaagaaatcacttctcttctaacaaggagcagcctggaagatcgggctgtaaacatgtataaggaagcagctctggcacagagggggagcttcctgggtaatcagcaagcttcacatacgtaaggtgggtatgtgaagtaaacacagtatgtgaagtaaacacagtggaccttagtacatactcagataaggaagctggaagcttgcatgttgtgagttgttggggttgcctgcagctgcacggagagaaaggggtacctggggccaggcatgtccaccatggtggctccacctccccttatttagcacatgcacaataggaaagagataagcaatgtggagtagctcaggccaaggacctgcctgcataataaaaggttggggtgggggatgccagagattcacgctctgtgcagatggcaacacctggtcctaactggttttttgctccctatgtgtagataagctacccccttcccattagctcatttataaaaatgcttgcatttcactgtggaatgggaactcttttcaggacctctctctgcaggagagagctagtctctttcttttgcctattaaacttctgctctagcctcacacccttggtgtgtcagcgtccttgatttcctcagcgtgagaccaagaacctcgggtgccaccccaggcaacaaggccatttcagtttgttcttttgttataggcaatccatgatcacagatttttctctcttttttttttttacacagtttagagttttagttttacacttaggtctgtaatccattttgtattaattcttatatgtggctcagtgtaggtggaaatttggtttgtttttgcataaggatttccaatagttttaccaccatttcttgaaactactatgctttctctattaaaccacatttgtaactttagttaaaatcagtcacatatatcacagggctatttctgactctcaattctgttacattgtctattagtgtatattgatgtcagtactacacttttaattactattgcttcagggtatgtcttgtaaaccaaaaataaaattataggccccccccgcccctgcacaaccaactgaatggacccatcctctcagccaagggcattccaaaattaacctgaaaaactagttcaagccatgatgggaagggggagttggacatgtctcatcacaccctactaccttttggaattactgatagaacagactcttaaagtctgaaaagaaacatttacaacctaccctctctgaagcctgctacctgggagcttcatctgcatgataaaaccttggtctccacaaccccttatggtaacccaaacattcctttctgttgataataactctttcaactagttgccaattagaaaatctttaaatcttcctatgacctagaaacctccctacccccactttgagttgtcctgcctttcctgacagaactcatgtacatcttacatatattgattgatgcctcatgtctccctaaaatgtataaaacaaagctgtaccccaccaccttggggacatgtcatcaggacctcctgtggctgtgtcataggagcgtctttaactttggcaaaataaactttctaaattgattgaaacctgtcttagctacttctggtttacagtcttaaagttagataatgtaaattgtccagctttggtttatttttgtccttagtagttccatataaattttagaatcagcttttcaatttaatacactactttcctcttagatccacaattaaatatatttgatgctaacaattctgttttatgtttttcgttttttttttttgagacaagagtttcgctcttgttgcccaggctggagtgcagtggcgcgatcttggctcaccacaacctccacctcccaggttcaagcaattcttctgcctcagcctcccgagtagctgggattacaggcatgcgccaccacgcccggctaattttgtatttttagtagagacggggtttcaccatgttgatcaggctggtcttgaactcctgacctcaggtgatccacccacctcggcctcccaaagtgttgggattacaggcgtgaaccaccatgcctggccagttctgttatttttaaaacccaagtttccctggtcatatcttggttggatgaagcgtattttcaatagattaccctggaaaggctagtgagtacggtattcttctacattttagacttttcttagtcttgctacttcaaggacagctaggctgcatataaaattcttggctcatactttttccccataaatttctatgagaaagtctaatgataactgattttctttattttgtaacttagtctttttgcttagaggctctctgaggatgggagggggttcttcctcccatccctaggaatttttcttttttttaaattcctaatcactagaccaccaggaagattgtttgttttgttttgtttttattcttcagggaccccatttatacatacgttaaataaatactgtttgccaatgtatcaaccattttgcttcttatttatttttgttcctttggttctttttcatggctttgctttggtgctccttagattttcagtcagatgtatttgtccttgggtaccttgtaatcagtattaccttttcttctgtcgctttgttttctgttcgttttgaaattacttgtttcctggtctggcaataacagttgagatatgaggagtttgagctgccatctgtctatgtatcttgctttaagactgcactcttctattgatatcactggccttgattttgtgatttctttatttcttcaggaccacccttcattttctactgtttgcttcctttttttttgagatggagtctcactctgtcactcaggctggagtgcagtgatcttggctcattgcaacctctgcctcccgggttccagcaattctcctgcctcagcctcccaagtatctgggactacaggtgtgcaccaccatgcccggctaagttttgtatttttaatagagacggggttttgccacattggcaggctggtctcaaactcctgatgtcaagtgatccacccaccccacccacctctgcatcccaaagtgctgggattacaggaatgagctgccgtgcccagcctcccccctacccccctttttttctttcgagacagagattataggtgtgagccactggacccagcctgtttttattccttttaccaaatctccaaggaatatcttcccttccaagtgcgaatgtaaccttaagtcagttaacctctttgtgattacttttcttatctgcaaagtgacttaatgatcttaagtactttttttttttgagacagggtctcactgtcaccctggctggagtgcagtggcacgatctctgatctccactcactgcaatctcctcttccctggttcaagcggccctcccaccttagccttctgggtagctgggactacagatgtgaaccaccacgcccagctaatttttgtactttttgtagagatggggttttgccatgttgcccaggctgggattattaagtactttttatcatacagcaagattgacattttatattggaatacatttgtctctatataacggagattaacaggaaaatgacaagcctgggtgcggtggctcatgcctgtaatcccagcactttgggaggctgaggtgggaggatcacttgaggtcaggagttcgagaccagttttgccaagatgatgaaagcccatgtctactaaaaatacaaaaattagcccagcttgatggtgggcgcctataatcccagctatttgagagactgaggcaggagaatcacttgaacctgggcagcagaggttgcagtgagccgagatcatgccactgcactccagcctgggtggcatagcgagactcttgtctcaagagaaaacaaaacaaaacaaaaaaaaaacaggaaaatgacaaaaagtaatattacaactcagtgaattttataacaaacttttttggaattcattgactaatactataccaaatccaaaatactctctagtataccaaatccaactctaccctatagtataaattggattctatttggacttgtctcactaatccctcatacagtgtgttttattttttattgaagtaaaaaaatttgtcattttaaccatttttaagtatatagttcagtaatattaagtatgttcatgttgttgcgcaatagatcttcggaagtttttcgtcttgcaacctgaaactctacccattagcaaattcccatttctccttacacttagcccttggtaatcatcattcttttttttttttttttgagatggagttttactcttgttgcccaggctggagtgcaatggtgcaatctcgactcaccacaacctccgcctcccaggttcaagcaattctacctcagcctcccgagtagctgggattacagtcatgcaccaccacgcccggctaattttgtatttttagtagagaaggggtttctccatgttgaggctggtctcgaactcctgacctcaggtgatctgcccacctcggcctcccaaagtgctgggattacaggcgtgagccactgcgcctggcccattctttctaattctataaatttgactacttagttaccttacataaataaattcttatagttagtgttatttttgcttccatgccttttttgttgttgttcatgctcttacttggaatgcgttctattttgtctacctatgcacatcctgttgggttttttttttttttgggggttttttttgtttttttttgtttttttttcccagacaaggtctcaatttgttacccaggctggagtgcagcggcgccatctccactcactgcatcctcaacttcctgggcccaggtgatcctctcgcctcagcccctgcaggtagctgggactataggcatgtgccaccatgcccagctaaatttggtttttttgtttgtttgtttttgagacagagtctcactctgtcacccaggctggagtgcagtggcacaatctcagctcactgcaatctctgccgcccgggttcaagtgattctcctgcctcagcctcccaagcagctgggattacaggtgactgccaccacgccagctaagttttgtagttttagtagagatggggtttcaccttgttggccatgctggtctcgaactcctgacctcgtgatctgcctgcttctgcctcccaaagtgctggaattacaggcatgagccaccacgcccggccagaatttttgtatttttagtagacacaaggttcttaccctgttgcctaggctggtctggaagtcctggactcaagcaattcacctgccttggcctcccaaaatgctgggattacaagccaccatgcccggcctaaatcctgttgttttgttttgttttattttgttttgttttgttttgtttgttttttgagacagagtctcgctatgtctctcaggctgtagtgcagtggcgcgatcttggctcactgccacctctgcctcccaggttcaagtgattctcctgcctcagcctcccaagtagctgggattacaggcatgtgctactatgtccggctaatttttgtatttttagtagagacagggtttcaccatgttggccaggctggtctcgaactcctgacctcgtgatccacccacctcggccacccaaagtgctgggattacaggcgtgagtggtttttatttcttaggccggtttcctccatatgatcttgcagtagacattaatttctttcctttttaattaaaatactgtttgtatttcacattttgatgtttgttaagatttgttttatattgttttttgttttgtcttgtgtgatagtcttaaatccctagttagataataactggagagtaccatgtttctatatatctctcagtgacttgcacagtgctagcagatagtgctaaaaaattatttattattattattattttgttattgttgttgttgttgttagacagggtcttcctctgtcacccaggctagagggcaatgggatgatcatagcttactgcagcctccaacaactgggctcatgtaattctcctgcctcagcttcccaagtagctgggattacaggcatgagccaccatgtctggacaaaaatatttccaggtgcagtggctcatgcctgtaattcccacacttgggaggccgagcgaggctggaggatcacttgagcctaggagttcaagaccagcttggctaagatggcgagaccccgtccctacaaaaaattttaaaaactagccaggcatggtggcatgcacctatattcccaactactcagtgggctgaggtgggagggtcatttgaacacaggaatttgaggggagaaaaaaagaagagagaaagagaagtgaaggaaggaagaaaggaaggagggagggagagaagaaagaaacgaaagaaaggaaaagaaaaggaaggaaagaaaattggtaccaggaaagcaggaaagggaaatggaagtaaaaaaataataataataataaaatgaaaattggttagtcactattaacaatttgtatccttataatctggaaacattataatttcaaaagaaaaaatattctttggatcataggttctgaggtcagaacagcattcccgtagtctagatgaagtcaagttttatctgatcttaattgaaataaatatagctggccttgaacaaatctactcatggtatgtggataggaattaaattgtaggggcattcacttgatggcattcattcttagaacatttacctatgtctagcttttggagtaaagtcacataacctctaaccaggtaagtttcctgtggctttatttaggattttaaatactcattttcagtgtaattttgttatgtgtggattaagatgactcttggtactaacatacattttctgattaaacctatctgaacatgagttgtttttatttcttaccctttccagagcgatgattctgacatttgggatgatacagcactgataaaagcatatgataaagctgtggcttcatttaaggtatgaaatgcttgcttagtcgttttcttattttctcgttattcatttggaaaggaattgataacatacgataaagtgttaaagtacatgttattcagttttcattttgaagattagatggtagtatgagttagttaaatcaggtgatatcctcctttagaagttgatagcctatatatgtcatcctttgtggaggcaatttaaataaaatttaaaacatttattcctggctgggtatggtggctcactcctgtaatcccagcactttgagaggctgaggcgggtggatcacctgaggtcaggagtttgagaccagcctggccaacatggtgaaaccccgtctttactaaaaatacaaaaattagccaagcatggtggcacgtgcctgtaatcccagctgcttgggacactgaggcaggagaattgcttgaacctggggggcagaggttgcaatgattgcaccactgcactccagcctgggcgatagagtgagactccatctcagaaaacgaacaaacaatgtattccttttagtatttttacattgtatcaaactatggaagtcctctaattgagattaataagaaaaagacaatctgaattataattttaaacatttaacaagcatgtagtaaaataatgatgaagataaatagcattagtacagcaattaatatttgtagcatgctgacagtgctctgtgtgcgtttcatatattaaattactctaatcatcccaaatcctgtaagttgggtatcaattcaagtgttcctattgggtaggaatatacagttcttttaggaaatgtagtatggttctgtgtctcaaacaggacacttacacagttggccaacatcatcaccttctccattctctgagatgtttagtcttactgagcactaaatatgggtcatcaatagtccagactaccttgagcaaacaatagtccagactaccttgagcaaacagagcatatactcatacagtgtataaagagcaccaagcatacagatttcatgtctttctcatagttactcttgtaacatgagctaaagatcagacctctatgtcacctttgtaactgatttctagatttttttttttttttgagatggggtcttgccctgtcacccaggctggagtgtagtggcgtgatcatgcctcattggagccttcaactcatgagctcaaacaatcctcctacctcagcttcctgagtagttgggaccacaggtgtgtgccaccacacccagctcatttttgtattctttgtagagatgcagtctcaccctgttgcccacgctggcctggaactcctgagctcaaaagatccctccgccttgaccttccaaagtgctgggattacaagcatgaaccactgcacccggcctagatttttaaatgtgctttccagtatacactgaaactagaagtcgactaaagaattaccaagagaattctataaaatagagattgaaatggggctcgatgtgggatgggttggtgatattgcagggagaagtaatctgagtaaaggaggaaaagaactgatttgggaaaacgatagttttagtagtgagtttgagtatgaattaagttgagattgaatttgaattaagttgaggttgaatatgaattaagttgaggttgagtttgaggtatgaattaagatgtgaaattgatcattggaaatgttagattgagaaaagtcacagctggattaatagcttcagaagtgtgtttgcagacagttgcaactaaagtaataagaatagatggccttggccgggcgcggtggctcacgcctgtaatcccagtactttgggaggctgaggcgagcaaatcacgaggtcaggagttcaagaccagcctggcccacatggtgaaaccccgtctttattaaaaatacaaaaattagctgtgcacagtggtgcacgcctgtaatcccagctactcgggaggctgagacaggagaatcgcttgaacctgggaggtggaggttgcagtgagctgagatcagtgtgactgcactccagcccggtgacagagtgagactctgtgtaaaaaaataaaataaataaaataatggccgtaagcaagtaaagaaggatggccagctcttattgggaatgcctaaatctaaggcttgatcagaagtaatgaaaccgttggggccctacattgctatgacatccaaagggccatgaatatcaggaagaaagataattaacagggtctaatgttacagagaggttgagagcaaggagatttgattaaaagggtctttagagctgatgtcaggtgtatgatgcctttaagagcagtttttatagtgcagggggtggtcaaaagagaaaataggtgctttctgaggtgacggagccttgagactagcttatagtagtaactgggttatgtcgtgacttttattctgtgcaccaccctgtaacatgtacatttttattcctattttcgtagcatgctctaaagaatggtgacatttgtgaaacttcgggtaaaccaaaaaccacacctaaaagaaaacctgctaagaagaataaaagccaaaagaagaatactgcagcttccttacaacaggttattttaaaatgttgagatttaacttcaaaggatgtctcattagtccttatttaatagtgtaaaatgtctttaacttaagtgattagtacagtgtttctattgacatatacttatacaacttcaaaaacaactattaaattttctgttatttaggaacatgcatattagtcatgaaagtataaagaattagatgggaatgataaatgctaaaatcaggacatgtgttccatttgtgaatggaaggcagggagaaggtgccgtttggaaggagtacccaagagccgtaagctgaattggcagtgttttacatcttaagctgagagatagatttttttttcccctttttctttaaaaactctaaaactgttaattccaaggaacccagaagtctaggtagattatttctgctagttaaaagcagtagtcctgaaagctgaatattttggtgtcttttgagccaactttagtttcatcattaccaagggggaagagagctaacagttgatgagcacttgctctaggccagtccagagtgctgggcaccatacgcattttatctccctcccgctattcacaacaaatatgggaggtagtttatattatagccatctaataagatggggaaactaagactcaaagagattcagaaacttgtccatgattataaatgtaagagagttggaattcagatttatgtatttagaccccaagcctttctcattacatcattttgccttccaaatctctaccctctatccttcacctccccactgatcaaaacgagatgatagtttgccctcttcaaaagaaatgtgtgcatgtatatatctttgatttcttttgtagtggaaagttggggacaaatgttctgccatttggtcagaagacggttgcatttacccagctaccattgcttcaattgattttaagagagaaacctgtgttgtggtttacactggatatggaaatagagaggagcaaaatctgtccgatctactttccccaatctgtgaagtagctaataatatagaacaaaatgctcaagaggtaaggatacaaaaaaaaaaaaattcaatttctggaagcagagactagatgagaaactgttaaacagtatacacagttgtcagtttgatccaccgaggcattaattttttcttaatcacacccttataacaaaaacctgcatattttttctttttaaagaatgaaaatgaaagccaagtttcaacagatgaaagtgagaactccaggtctcctggaaataaatcagataacatcaagcccaaatctgctccatggaactcttttctccctccaccaccccccatgccagggccaagactgggaccaggaaaggtaaaccttctatgaaagttttccagaaaatagttaatgtcgggacatttaacctctctgttaactaatttgtagctctcccatgaaacttttgtagcttaaatacacaagaattttttgaaaaggaaataagataatgatgcaaaatagttaattttttaaaaaaatgttagacactgcagtggatgcaacaaaatactttatatgaaagatttatccagttaacttttgtggagtattaggtattagactaataattagcacacttacttaagttagaaagtataataatgcgccggacgcggtagctcacgcctgtaatcccagcactttgggaggccaaggtgggcggatcacaaggtcaggagatcgagaccatcctggctaacacggtgaaaccccatctctactgaaaatacaaaaaaatttgccgggcgtgatggcgggcacctgtagtcccagctactcgggaggctgaggcaggaggatggtgtgaaccccggaggcagagcttgcagtgagtcaagatcgtgccactgcactccaacctgggcgacagaatgagactccatctcaaacaaaaaaacaaaacaaaacaaaaaaaagtgtaataataatttatcattagctggatgatatgctgttgtttcccatgtcacctgtataagatatgtaaaataagaacacattatttacatctaatatagataaaatcctgaggcgctctcagattgttttgtagagttcaaatgtaaatattgttttcatttatggtccttttggttataagtaacagaaatcaactctaaaaagatttttattataggttagattatgtcatggaaccttaaggcttgtccctttctagttcttttgtgtaaagcggtgatttcttccatggagggaatggtatttaggcaatttttttttttttttcgagatggagtcttgctctgtcgctcaggctggagtgcagtggcaccatttcagctcactgcaacttccacctcctgggttcaagtgattctcctgcttcagcctcccaagtagctgagattacaggcacccgccaccacacccggcttattttgtatttttagtagagatggggtttcaccatgttggccaggctggtcttgaactcctgacctcaagtgatctccccaccttggccttccaaagtgctaggattacaggcgcctagcctaggcagtcattttcaaaaaacaagcatgactcaccaaaagttttaagattttctgtgataatgttcttattgaggcttacattatattacagtttcttgaatctaaaatgatgtaccctcttagaatatatacatcatgcttcattggtctcagggggctgatttttataaggagagatttgctagttttcacaatatgtcctctaagttggcatgtatagctaaacaggctttcataaaaatatacaatttagttaatgaaatttgggatatagtcttttatgattgaaataattttgctaaatagactgtctctgatttattaggtaatcaccactcttattttgttttacttccttaatgtctacatagaaaggaaatgagaaaaatccagaggttgtcatttgacttatgagtctgtttgacttcaggatttggtacatgaaatttcacttaatctttttgatatgtataaaacaaatattctgggtaattatttttatccttttggttttgagtcctttttattcctatcatattgaaattggtaagttaattttcctttgaaatattccttatagccaggtctaaaattcaatggcccaccaccgccaccgccaccaccaccaccccacttactatcatgctggctgcctccatttccttctggaccaccagtaagtaaaaaagagtataggttagattttgctttcacatacaatttgataattagcagaatagaggattgtaaaatgtcattgtagaacatcccttgggccagattctaatgggtagaaatttgaactaaacctctgggttttgtttgtttttaatgcctttctgttacccagatgcagtgctcttgtagtcccaagtctaagctctaggttgccttctttcctggcagaagttggtgtctatgccataaggaggtagttcctgttagaagggatttaattataccttatataaggaattagtgtttgcccttctaggtatagttggatgttagcttctgatgtaaactggatttctttttctttctctctctttttttttttttgttttggaggcagagttttgcccttgtaccccaggctggagtgcagtggtgtgatctcagctcacagcaacctccgcctcctgggttcaagcaattctgcctcggcctcccaagtagctgggattacaggcgactgccaccacacccggctaatttttgttttattagtagagatggggtttcaccatgttggccagactgatcttgaactcctgacctcaggtgatccacccgccttggcctcccaaagcgctgggattacaggcgtgagctgccgcacccagctgtaaactggatttctaatggtagatttttaggtattaacaatagataaaaagatactttttggcatactgtgtattgggatggggttagaacaggtgttctacccaagacatttacttaaaatcgccctcgaaatgctatgtgagctgtgtgtgtgtgtgtgtgtgtgtgtgtattaaggaaaagcatgaaagtatttatgcttgattttttttttttactcatagcttcatagtggaacagatacatagtctaaatcaaaatgtttaaactttttatgtcacttgctgtcttttcgtcctcgttaaatttaattttgttggtcttttgttgttattggttggttttctccaaatgctagctatgttaagaaatttaaggccaggtacagtggctcatgcctgtaatcccggcattttagaaggctgaggcaggaggatcacttgagctcaggagtttgagaccagtctgggcaacatagcaagacctcgtctttgtttaggggaaaaaaaagaaatttaagtaggagattatataagcaaaaatacaattaatttccagcattcactatataatataaatctccagactttacttttttgtttactggatataaacaatatctttttctgtctccagataattcccccaccacctcccatatgtccagattctcttgatgatgctgatgctttgggaagtatgttaatttcatggtacatgagtggctatcatactggctattatatggtaagtaatcactcagcatcttttcctgacaatttttttgtagttatgtgactttgttttgtaaatttataaaatactacttgcttctctctttatattactaaaaaataaaaataaaaaaatacaactgtctgaggcttaaattactcttgcattgtccctaagtataattttagttaattttaaaaagctttcatgctattgttagattattttgattatacacttttgaattgaaattatactttttctaaataatgttttaatctctgatttgaaattgattgtagggaatggaaaagatgggataatttttcataaatgaaaaatgaaattcttttttttttttttttttttttgagacggagtcttgctctgttgcccaggctggagtgcaatggcgtgatcttggctcacagcaagctctgcctcctggattcacgccattctcctgcctcagcctcagaggtagctgggactacaggtgcctgccaccacgcctgtctaattttttgtatttttttgtaaagacagggtttcactgtgttagccaggatggtctcaatctcctgaccccgtgatccacccgcctcggccttccaagagaaatgaaatttttttaatgcacaaagatctggggtaatgtgtaccacattgaaccttggggagtatggcttcaaacttgtcactttatacgttagtctcctacggacatgttctattgtattttagtcagaacatttaaaattattttattttattttattttttttttttttttgagacggagtctcgctctgtcacccaggctggagtacagtggcgcagtctcggctcactgcaagctccgcctcccgggttcacgccattctcctgcctcagcctctccgagtagctgggactacaggcgcccgccaccacgcccggctaatttttttttatttttagtagagacggggtttcaccgtggtctcgatctcctgacctcgtgatccacccgcctcggcctcccaaagtgctgggattacaagcgtgagccaccgcgcccggcctaaaattatttttaaaagtaagctcttgtgccctgctaaaattatgatgtgatattgtaggcacttgtatttttagtaaattaatatagaagaaacaactgacttaaaggtgtatgtttttaaatgtatcatctgtgtgtgcccccattaatattcttatttaaaagttaaggccagacatggtggcttacaactgtaatcccaacagtttgtgaggccgaggcaggcagatcacttgaggtcaggagtttgagaccagcctggccaacatgatgaaaccttgtctctactaaaaataccaaaaaaaatttagccaggcatggtggcacatgcctgtaatccgagctacttgggaggctgtggcaggaaaattgctttaatctgggaggcagaggttgcagtgagttgagattgtgccactgcactccacccttggtgacagagtgagattccatctcaaaaaaagaaaaaggcctggcacggtggctcacacctataatcccagtactttgggaggtagaggcaggtggatcacttgaggttaggagttcaggaccagcctggccaacatggtgactactccatttctactaaatacacaaaacttagcccagtggcgggcagttgtaatcccagctacttgagaggttgaggcaggagaatcacttgaacctgggaggcagaggttgcagtgagccgagatcacaccgctgcactctagcctggccaacagagtgagaatttgcggagggaaaaaaaagtcacgcttcagttgttgtagtataaccttggtatattgtatgtatcatgaattcctcattttaatgaccaaaaagtaataaatcaacagcttgtaatttgttttgagatcagttatctgactgtaacactgtaggcttttgtgttttttaaattatgaaatatttgaaaaaaatacataatgtatatataaagtattggtataatttatgttctaaataactttcttgagaaataattcacatggtgtgcagtttacctttgaaagtatacaagttggctgggcacaatggctcacgcctgtaatcccagcactttgggaggccagggcaggtggatcacgaggtcaggagatcgagaccatcctggctaacatggtgaaaccccgtctctactaaaagtacaaaaacaaattagccgggcatgttggcgggcaccttttgtcccagctgctcgggaggctgaggcaggagagtggcgtgaacccaggaggtggagcttgcagtgagccgagattgtgccagtgcactccagcctgggcgacagagcgagactctgtctcaaaaaataaaataaaaaagaaagtatacaagtcagtggttttggttttcagttatgcaaccatcactacaatttaagaacattttcatcaccccaaaaagaaaccctgttaccttcattttccccagccctaggcagtcagtacactttctgtctctatgaatttgtctattttagatattatatataaacggaattatacgatatgtggtcttttgtgtctggcttctttcacttagcatgctattttcaagattcatccatgctgtagaatgcaccagtactgcattccttcttattgctgaatattctgttgtttggttatatcacattttatccattcatcagttcatggacatttaggttgtttttatttttgggctataatgaataatgttgctatgaacattcgtttgtgttctttttgtttttttggttttttgggttttttttgttttgtttttgtttttgagacagtcttgctctgtctcctaagctggagtgcagtggcatgatcttggcttactgcaagctctgcctcccgggttcacaccattctcctgcctcagcccgacaagtagctgggactacaggcgtgtgccaccatgcacggctaattttttgtatttttagtagagatggggtttcaccgtgttagccaggatggtctcgatctcctgacctcgtgatctgcctgcctaggcctcccaaagtgctgggattacaggcgtgagccactgcacctggccttaagtgtttttaatacgtcattgccttaagctaacaattcttaacctttgttctactgaagccacgtggttgagataggctctgagtctagcttttaacctctatctttttgtcttagaaatctaagcagaatgcaaatgactaagaataatgttgttgaaataacataaaataggttataactttgatactcattagtaacaaatctttcaatacatcttacggtctgttaggtgtagattagtaatgaagtgggaagccactgcaagctagtatacatgtagggaaagatagaaagcattgaagccagaagagagacagaggacatttgggctagatctgacaagaaaaacaaatgttttagtattaatttttgactttaaattttttttttatttagtgaatactggtgtttaatggtctcattttaataagtatgacacaggtagtttaaggtcatatattttatttgatgaaaataaggtataggccgggcacggtggctcacacctgtaatcccagcactttgggaggccgaggcaggcggatcacctgaggtcgggagttagagactagcctcaacatggagaaaccccgtctctactaaaaaaaatacaaaattaggcgggcgtggtggtgcatgcctgtaatcccagctactcaggaggctgaggcaggagaattgcttgaacctgggaggtggaggttgcggtgagccgagatcacctcattgcactccagcctgggcaacaagagcaaaactccatctcaaaaaaaaaaaaataaggtataagcgggctcaggaacatcattggacatactgaaagaagaaaaatcagctgggcgcagtggctcacgccggtaatcccaacactttgggaggccaaggcaggcgaatcacctgaagtcgggagttccagatcagcctgaccaacatggagaaaccctgtctctactaaaaatacaaaactagccgggcatggtggcgcatgcctgtaatcccagctacttgggaggctgaggcaggagaattgcttgaaccgagaaggcggaggttgcggtgagccaagattgcaccattgcactccagcctgggcaacaagagcgaaactccgtctcaaaaaaaaaaggaagaaaaatatttttttaaattaattagtttatttattttttaagatggagttttgccctgtcacccaggctggggtgcaatggtgcaatctcggctcactgcaacctccgcctcctgggttcaagtgattctcctgcctcagcttcccgagtagctgtgattacagccatatgccaccacgcccagccagttttgtgttttgttttgttttttgttttttttttttgagagggtgtcttgctctgtcccccaagctggagtgcagcggcgcgatcttggctcactgcaagctctgcctcccaggttcacaccattctcttgcctcagcctcccgagtagctgggactacaggtgcccgccaccacacccggctaatttttttgtgtttttagtagagatggggtttcactgtgttagccaggatggtctcgatctcctgaccttttgatccacccgcctcagcctccccaagtgctgggattataggcgtgagccactgtgcccggcctagtcttgtatttttagtagagtcgggatttctccatgttggtcaggctgttctccaaatccgacctcaggtgatccgcccgccttggcctccaaaagtgcaaggcaaggcattacaggcatgagccactgtgaccggcaatgtttttaaattttttacatttaaattttattttttagagaccaggtctcactctattgctcaggctggagtgcaagggcacattcacagctcactgcagccttgacctccagggctcaagcagtcctctcacctcagtttcccgagtagctgggactacagtgataatgccactgcacctggctaatttttatttttatttatttatttttttttgagacagagtcttgctctgtcacccaggctggagtgcagtggtgtaaatctcagctcactgcagcctccgcctcctgggttcaagtgattctcctgcctcaacctcccaagtagctgggattagaggtccccaccaccatgcctggctaattttttgtactttcagtagaaacggggttttgccatgttggccaggctgttctcgaactcctgagctcaggtgatccaactgtctcggcctcccaaagtgctgggattacaggcgtgagccactgtgcctagcctgagccaccacgccggcctaatttttaaattttttgtagagacagggtctcattatgttgcccagggtggtgtcaagctccaggtctcaagtgatccccctacctccgcctcccaaagttgtgggattgtaggcatgagccactgcaagaaaaccttaactgcagcctaataattgttttctttgggataacttttaaagtacattaaaagactatcaacttaatttctgatcatattttgttgaataaaataagtaaaatgtcttgtgaaacaaaatgctttttaacatccatataaagctatctatatatagctatctatatctatatagctattttttttaacttcctttattttccttacagggttttagacaaaatcaaaaagaaggaaggtgctcacattccttaaattaaggagtaagtctgccagcattatgaaagtgaatcttacttttgtaaaactttatggtttgtggaaaacaaatgtttttgaacatttaaaaagttcagatgttagaaagttgaaaggttaatgtaaaacaatcaatattaaagaattttgatgccaaaactattagataaaaggttaatctacatccctactagaattctcatacttaactggttggttgtgtggaagaaacatactttcacaataaagagctttaggatatgatgccattttatatcactagtaggcagaccagcagacttttttttattgtgatatgggataacctaggcatactgcactgtacactctgacatatgaagtgctctagtcaagtttaactggtgtccacagaggacatggtttaactggaattcgtcaagcctctggttctaatttctcatttgcaggaaatgctggcatagagcagcactaaatgacaccactaaagaaacgatcagacagatctggaatgtgaagcgttatagaagataactggcctcatttcttcaaaatatcaagtgttgggaaagaaaaaaggaagtggaatgggtaactcttcttgattaaaagttatgtaataaccaaatgcaatgtgaaatattttactggactctattttgaaaaaccatctgtaaaagactgaggtgggggtgggaggccagcacggtggtgaggcagttgagaaaatttgaatgtggattagattttgaatgatattggataattattggtaattttatgagctgtgagaagggtgttgtagtttataaaagactgtcttaatttgcatacttaagcatttaggaatgaagtgttagagtgtcttaaaatgtttcaaatggtttaacaaaatgtatgtgaggcgtatgtggcaaaatgttacagaatctaactggtggacatggctgttcattgtactgtttttttctatcttctatatgtttaaaagtatataataaaaatatttaatttttttttaaa

SEQ ID NO: 2-10 - skipped (9 entries)

SEQ ID NO: 11 - DNA, 24 bp, synthetic construct
  misc_feature 1..24: note = Primer
  source 1..24: mol_type = other DNA
gctgatgctttgggaagtatgtta

SEQ ID NO: 12 - DNA, 25 bp, synthetic construct
  misc_feature 1..25: note = Primer
  source 1..25: mol_type = other DNA
caccttccttctttttgattttgtc

SEQ ID NO: 13 - DNA, 21 bp, synthetic construct
  misc_feature 1..21: note = Probe
  source 1..21: mol_type = other DNA
tacatgagtggctatcatact

SEQ ID NO: 14 - DNA, 27 bp, synthetic construct
  misc_feature 1..27: note = Primer
  source 1..27: mol_type = other DNA
catggtacatgagtggctatcatactg

SEQ ID NO: 15 - DNA, 25 bp, synthetic construct
  misc_feature 1..25: note = Primer
  source 1..25: mol_type = other DNA
tggtgtcatttagtgctgctctatg

SEQ ID NO: 16 - DNA, 21 bp, synthetic construct
  misc_feature 1..21: note = Probe
  source 1..21: mol_type = other DNA
ccagcatttccatataatagc

SEQ ID NO: 17 - DNA, 20 bp, synthetic construct
  misc_feature 1..20: note = Primer
  source 1..20: mol_type = other DNA
caggaggattccgtgctgtt

SEQ ID NO: 18 - DNA, 24 bp, synthetic construct
  misc_feature 1..24: note = Primer
  source 1..24: mol_type = other DNA
cagtgctgtatcatcccaaatgtc

SEQ ID NO: 19 - DNA, 15 bp, synthetic construct
  misc_feature 1..15: note = Probe
  source 1..15: mol_type = other DNA
acaggccagagcgat

SEQ ID NO: 20 - RNA, 20 nt, synthetic construct
  misc_feature 1..20: note = Synthetic oligonucleotide
  source 1..20: mol_type = other RNA
  modified_base 1: mod_base = OTHER; note = 2'-O-methoxyethyl modified nucleotide with phosphorothioate linkage
  modified_base 2: mod_base = OTHER; note = 2'-O-methoxyethyl modified thymine with phosphorothioate linkage
  modified_base 3: mod_base = OTHER; note = 2'-O-methoxyethyl modified thymine with phosphorothioate linkage
  modified_base 4: mod_base = OTHER; note = 2'-O-methoxyethyl modified 5-methyl cytosine with phosphorothioate linkage
  modified_base 5: mod_base = OTHER; note = 2'-O-methoxyethyl modified nucleotide with phosphorothioate linkage
  modified_base 6: mod_base = OTHER; note = 2'-O-methoxyethyl modified 5-methyl cytosine with phosphorothioate linkage
  modified_base 7: mod_base = OTHER; note = 2'-O-methoxyethyl modified thymine with phosphorothioate linkage
  modified_base 8: mod_base = OTHER; note = 2'-O-methoxyethyl modified thymine with phosphorothioate linkage
  modified_base 9: mod_base = OTHER; note = 2'-O-methoxyethyl modified thymine with phosphorothioate linkage
  modified_base 10: mod_base = OTHER; note = 2'-O-methoxyethyl modified 5-methyl cytosine with phosphorothioate linkage
  modified_base 11: mod_base = OTHER; note = 2'-O-methoxyethyl modified nucleotide with phosphorothioate linkage
  modified_base 12: mod_base = OTHER; note = 2'-O-methoxyethyl modified thymine with phosphorothioate linkage
  modified_base 13: mod_base = OTHER; note = 2'-O-methoxyethyl modified nucleotide with phosphorothioate linkage
  modified_base 14: mod_base = OTHER; note = 2'-O-methoxyethyl modified nucleotide with phosphorothioate linkage
  modified_base 15: mod_base = OTHER; note = 2'-O-methoxyethyl modified thymine with phosphorothioate linkage
  modified_base 16: mod_base = OTHER; note = 2'-O-methoxyethyl modified nucleotide with phosphorothioate linkage
  modified_base 17: mod_base = OTHER; note = 2'-O-methoxyethyl modified 5-methyl cytosine with phosphorothioate linkage
  modified_base 18: mod_base = OTHER; note = 2'-O-methoxyethyl modified thymine with phosphorothioate linkage
  modified_base 19: mod_base = OTHER; note = 2'-O-methoxyethyl modified nucleotide with phosphorothioate linkage
  modified_base 20: mod_base = OTHER; note = 2'-O-methoxyethyl modified nucleotide
attcactttcataatgctgg

SEQ ID NO: 21 - RNA, 18 nt, synthetic construct
  misc_feature 1..18: note = Synthetic oligonucleotide
  source 1..18: mol_type = other RNA
  modified_base 1: mod_base = OTHER; note = 2'-O-methoxyethyl modified 5-methyl cytosine with phosphorothioate linkage
  modified_base 2: mod_base = OTHER; note = 2'-O-methoxyethyl modified nucleotide
  modified_base 3: mod_base = OTHER; note = 2'-O-methoxyethyl modified 5-methyl cytosine with phosphorothioate linkage
  modified_base 4: mod_base = OTHER; note = 2'-O-methoxyethyl modified thymine
  modified_base 5: mod_base = OTHER; note = 2'-O-methoxyethyl modified thymine with phosphorothioate linkage
  modified_base 6: mod_base = OTHER; note = 2'-O-methoxyethyl modified thymine with phosphorothioate linkage
  modified_base 7: mod_base = OTHER; note = 2'-O-methoxyethyl modified 5-methyl cytosine with phosphorothioate linkage
  modified_base 8: mod_base = OTHER; note = 2'-O-methoxyethyl modified nucleotide with phosphorothioate linkage
  modified_base 9: mod_base = OTHER; note = 2'-O-methoxyethyl modified thymine with phosphorothioate linkage
  modified_base 10: mod_base = OTHER; note = 2'-O-methoxyethyl modified nucleotide with phosphorothioate linkage
  modified_base 11: mod_base = OTHER; note = 2'-O-methoxyethyl modified nucleotide with phosphorothioate linkage
  modified_base 12: mod_base = OTHER; note = 2'-O-methoxyethyl modified thymine with phosphorothioate linkage
  modified_base 13: mod_base = OTHER; note = 2'-O-methoxyethyl modified nucleotide with phosphorothioate linkage
  modified_base 14: mod_base = OTHER; note = 2'-O-methoxyethyl modified 5-methyl cytosine with phosphorothioate linkage
  modified_base 15: mod_base = OTHER; note = 2'-O-methoxyethyl modified thymine with phosphorothioate linkage
  modified_base 16: mod_base = OTHER; note = 2'-O-methoxyethyl modified nucleotide with phosphorothioate linkage
  modified_base 17: mod_base = OTHER; note = 2'-O-methoxyethyl modified nucleotide with phosphorothioate linkage
  modified_base 18: mod_base = OTHER; note = 2'-O-methoxyethyl modified 5-methyl cytosine
cactttcataatgctggc

SEQ ID NO: 22 - RNA, 20 nt, synthetic construct
  misc_feature 1..20: note = Synthetic oligonucleotide
  source 1..20: mol_type = other RNA
  modified_base 1: mod_base = OTHER; note = 2'-O-methoxyethyl modified thymine
  modified_base 2: mod_base = OTHER; note = 2'-O-methoxyethyl modified thymine with phosphorothioate linkage
  modified_base 3: mod_base = OTHER; note = 2'-O-methoxyethyl modified 5-methyl cytosine with phosphorothioate linkage
  modified_base 4: mod_base = OTHER; note = 2'-O-methoxyethyl modified nucleotide with phosphorothioate linkage
  modified_base 5: mod_base = OTHER; note = 2'-O-methoxyethyl modified 5-methyl cytosine with phosphorothioate linkage
  modified_base 6: mod_base = OTHER; note = 2'-O-methoxyethyl modified thymine with phosphorothioate linkage
  modified_base 7: mod_base = OTHER; note = 2'-O-methoxyethyl modified thymine with phosphorothioate linkage
  modified_base 8: mod_base = OTHER; note = 2'-O-methoxyethyl modified thymine with phosphorothioate linkage
  modified_base 9: mod_base = OTHER; note = 2'-O-methoxyethyl modified 5-methyl cytosine with phosphorothioate linkage
  modified_base 10: mod_base = OTHER; note = 2'-O-methoxyethyl modified nucleotide with phosphorothioate linkage
  modified_base 11: mod_base = OTHER; note = 2'-O-methoxyethyl modified thymine with phosphorothioate linkage
  modified_base 12: mod_base = OTHER; note = 2'-O-methoxyethyl modified nucleotide with phosphorothioate linkage
  modified_base 13: mod_base = OTHER; note = 2'-O-methoxyethyl modified nucleotide with phosphorothioate linkage
  modified_base 14: mod_base = OTHER; note = 2'-O-methoxyethyl modified thymine with phosphorothioate linkage
  modified_base 15: mod_base = OTHER; note = 2'-O-methoxyethyl modified nucleotide with phosphorothioate linkage
  modified_base 16: mod_base = OTHER; note = 2'-O-methoxyethyl modified 5-methyl cytosine with phosphorothioate linkage
  modified_base 17: mod_base = OTHER; note = 2'-O-methoxyethyl modified thymine with phosphorothioate linkage
  modified_base 18: mod_base = OTHER; note = 2'-O-methoxyethyl modified nucleotide with phosphorothioate linkage
  modified_base 19: mod_base = OTHER; note = 2'-O-methoxyethyl modified nucleotide
  modified_base 20: mod_base = OTHER; note = 2'-O-methoxyethyl modified 5-methyl cytosine
ttcactttcataatgctggc

SEQ ID NO: 23 - RNA, 18 nt, synthetic construct
  misc_feature 1..18: note = Synthetic oligonucleotide
  source 1..18: mol_type = other RNA
tcactttcataatgctgg

SEQ ID NO: 24 - RNA, 19 nt, synthetic construct
  misc_feature 1..19: note = Synthetic oligonucleotide
  source 1..19: mol_type = other RNA
  modified_base 1: mod_base = OTHER; note = 2'-O-methoxyethyl modified nucleotide with phosphorothioate linkage
  modified_base 2: mod_base = OTHER; note = 2'-O-methoxyethyl modified 5-methyl cytosine with phosphorothioate linkage
  modified_base 3: mod_base = OTHER; note = 2'-O-methoxyethyl modified thymine with phosphorothioate linkage
  modified_base 4: mod_base = OTHER; note = 2'-O-methoxyethyl modified thymine with phosphorothioate linkage
  modified_base 5: mod_base = OTHER; note = 2'-O-methoxyethyl modified thymine with phosphorothioate linkage
  modified_base 6: mod_base = OTHER; note = 2'-O-methoxyethyl modified 5-methyl cytosine with phosphorothioate linkage
  modified_base 7: mod_base = OTHER; note = 2'-O-methoxyethyl modified nucleotide with phosphorothioate linkage
  modified_base 8: mod_base = OTHER; note = 2'-O-methoxyethyl modified thymine with phosphorothioate linkage
  modified_base 9: mod_base = OTHER; note = 2'-O-methoxyethyl modified nucleotide with phosphorothioate linkage
  modified_base 10: mod_base = OTHER; note = 2'-O-methoxyethyl modified nucleotide with phosphorothioate linkage
  modified_base 11: mod_base = OTHER; note = 2'-O-methoxyethyl modified thymine with phosphorothioate linkage
  modified_base 12: mod_base = OTHER; note = 2'-O-methoxyethyl modified nucleotide with phosphorothioate linkage
  modified_base 13: mod_base = OTHER; note = 2'-O-methoxyethyl modified 5-methyl cytosine with phosphorothioate linkage
  modified_base 14: mod_base = OTHER; note = 2'-O-methoxyethyl modified thymine with phosphorothioate linkage
  modified_base 15: mod_base = OTHER; note = 2'-O-methoxyethyl modified nucleotide with phosphorothioate linkage
  modified_base 16: mod_base = OTHER; note = 2'-O-methoxyethyl modified nucleotide with phosphorothioate linkage
  modified_base 17: mod_base = OTHER; note = 2'-O-methoxyethyl modified 5-methyl cytosine with phosphorothioate linkage
  modified_base 18: mod_base = OTHER; note = 2'-O-methoxyethyl modified nucleotide with phosphorothioate linkage
  modified_base 19: mod_base = OTHER; note = 2'-O-methoxyethyl modified nucleotide
actttcataatgctggcag

SEQ ID NO: 25 - RNA, 20 nt, synthetic construct
  misc_feature 1..20: note = Synthetic oligonucleotide
  source 1..20: mol_type = other RNA
  modified_base 1: mod_base = OTHER; note = 2'-O-methoxyethyl modified 5-methyl cytosine with phosphorothioate linkage
  modified_base 2: mod_base = OTHER; note = 2'-O-methoxyethyl modified nucleotide with phosphorothioate linkage
  modified_base 3: mod_base = OTHER; note = 2'-O-methoxyethyl modified 5-methyl cytosine with phosphorothioate linkage
  modified_base 4: mod_base = OTHER; note = 2'-O-methoxyethyl modified thymine with phosphorothioate linkage
  modified_base 5: mod_base = OTHER; note = 2'-O-methoxyethyl modified thymine with phosphorothioate linkage
  modified_base 6: mod_base = OTHER; note = 2'-O-methoxyethyl modified thymine with phosphorothioate linkage
  modified_base 7: mod_base = OTHER; note = 2'-O-methoxyethyl modified 5-methyl cytosine with phosphorothioate linkage
  modified_base 8: mod_base = OTHER; note = 2'-O-methoxyethyl modified nucleotide with phosphorothioate linkage
  modified_base 9: mod_base = OTHER; note = 2'-O-methoxyethyl modified thymine with phosphorothioate linkage
  modified_base 10: mod_base = OTHER; note = 2'-O-methoxyethyl modified nucleotide with phosphorothioate linkage
  modified_base 11: mod_base = OTHER; note = 2'-O-methoxyethyl modified nucleotide with phosphorothioate linkage
  modified_base 12: mod_base = OTHER; note = 2'-O-methoxyethyl modified thymine with phosphorothioate linkage
  modified_base 13: mod_base = OTHER; note = 2'-O-methoxyethyl modified nucleotide with phosphorothioate linkage
  modified_base 14: mod_base = OTHER; note = 2'-O-methoxyethyl modified 5-methyl cytosine with phosphorothioate linkage
  modified_base 15: mod_base = OTHER; note = 2'-O-methoxyethyl modified thymine with phosphorothioate linkage
  modified_base 16: mod_base = OTHER; note = 2'-O-methoxyethyl modified nucleotide with phosphorothioate linkage
  modified_base 17: mod_base = OTHER; note = 2'-O-methoxyethyl modified nucleotide with phosphorothioate linkage
  modified_base 18: mod_base = OTHER; note = 2'-O-methoxyethyl modified 5-methyl cytosine with phosphorothioate linkage
  modified_base 19: mod_base = OTHER; note = 2'-O-methoxyethyl modified nucleotide with phosphorothioate linkage
  modified_base 20: mod_base = OTHER; note = 2'-O-methoxyethyl modified nucleotide
cactttcataatgctggcag

SEQ ID NO: 26 - RNA, 19 nt, synthetic construct
  misc_feature 1..19: note = Synthetic oligonucleotide
  source 1..19: mol_type = other RNA
  modified_base 1: mod_base = OTHER; note = 2'-O-methoxyethyl modified 5-methyl cytosine with phosphorothioate linkage
  modified_base 2: mod_base = OTHER; note = 2'-O-methoxyethyl modified nucleotide with phosphorothioate linkage
  modified_base 3: mod_base = OTHER; note = 2'-O-methoxyethyl modified 5-methyl cytosine with phosphorothioate linkage
  modified_base 4: mod_base = OTHER; note = 2'-O-methoxyethyl modified thymine with phosphorothioate linkage
  modified_base 5: mod_base = OTHER; note = 2'-O-methoxyethyl modified thymine with phosphorothioate linkage
  modified_base 6: mod_base = OTHER; note = 2'-O-methoxyethyl modified thymine with phosphorothioate linkage
  modified_base 7: mod_base = OTHER; note = 2'-O-methoxyethyl modified 5-methyl cytosine with phosphorothioate linkage
  modified_base 8: mod_base = OTHER; note = 2'-O-methoxyethyl modified nucleotide with phosphorothioate linkage
  modified_base 9: mod_base = OTHER; note = 2'-O-methoxyethyl modified thymine with phosphorothioate linkage
  modified_base 10: mod_base = OTHER; note = 2'-O-methoxyethyl modified nucleotide with phosphorothioate linkage
  modified_base 11: mod_base = OTHER; note = 2'-O-methoxyethyl modified nucleotide with phosphorothioate linkage
  modified_base 12: mod_base = OTHER; note = 2'-O-methoxyethyl modified thymine with phosphorothioate linkage
  modified_base 13: mod_base = OTHER; note = 2'-O-methoxyethyl modified nucleotide with phosphorothioate linkage
  modified_base 14: mod_base = OTHER; note = 2'-O-methoxyethyl modified 5-methyl cytosine with phosphorothioate linkage
  modified_base 15: mod_base = OTHER; note = 2'-O-methoxyethyl modified thymine with phosphorothioate linkage
  modified_base 16: mod_base = OTHER; note = 2'-O-methoxyethyl modified nucleotide with phosphorothioate linkage
  modified_base 17: mod_base = OTHER; note = 2'-O-methoxyethyl modified nucleotide with phosphorothioate linkage
  modified_base 18: mod_base = OTHER; note = 2'-O-methoxyethyl modified 5-methyl cytosine with phosphorothioate linkage
  modified_base 19: mod_base = OTHER; note = 2'-O-methoxyethyl modified nucleotide
cactttcataatgctggca

SEQ ID NO: 27 - RNA, 20 nt, synthetic construct
  misc_feature 1..20: note = Synthetic oligonucleotide
  source 1..20: mol_type = other RNA
  modified_base 1: mod_base = OTHER; note = 2'-O-methoxyethyl modified thymine with phosphorothioate linkage
  modified_base 2: mod_base = OTHER; note = 2'-O-methoxyethyl modified 5-methyl cytosine with phosphorothioate linkage
  modified_base 3: mod_base = OTHER; note = 2'-O-methoxyethyl modified nucleotide with phosphorothioate linkage
  modified_base 4: mod_base = OTHER; note = 2'-O-methoxyethyl modified 5-methyl cytosine with phosphorothioate linkage
  modified_base 5: mod_base = OTHER; note = 2'-O-methoxyethyl modified thymine with phosphorothioate linkage
  modified_base 6: mod_base = OTHER; note = 2'-O-methoxyethyl modified thymine with phosphorothioate linkage
  modified_base 7: mod_base = OTHER; note = 2'-O-methoxyethyl modified thymine with phosphorothioate linkage
  modified_base 8: mod_base = OTHER; note = 2'-O-methoxyethyl modified 5-methyl cytosine with phosphorothioate linkage
  modified_base 9: mod_base = OTHER; note = 2'-O-methoxyethyl modified nucleotide with phosphorothioate linkage
  modified_base 10: mod_base = OTHER; note = 2'-O-methoxyethyl modified thymine with phosphorothioate linkage
  modified_base 11: mod_base = OTHER; note = 2'-O-methoxyethyl modified nucleotide with phosphorothioate linkage
  modified_base 12: mod_base = OTHER; note = 2'-O-methoxyethyl modified nucleotide with phosphorothioate linkage
  modified_base 13: mod_base = OTHER; note = 2'-O-methoxyethyl modified thymine with phosphorothioate linkage
  modified_base 14: mod_base = OTHER; note = 2'-O-methoxyethyl modified nucleotide with phosphorothioate linkage
  modified_base 15: mod_base = OTHER; note = 2'-O-methoxyethyl modified 5-methyl cytosine with phosphorothioate linkage
  modified_base 16: mod_base = OTHER; note = 2'-O-methoxyethyl modified thymine with phosphorothioate linkage
  modified_base 17: mod_base = OTHER; note = 2'-O-methoxyethyl modified nucleotide with phosphorothioate linkage
  modified_base 18: mod_base = OTHER; note = 2'-O-methoxyethyl modified nucleotide with phosphorothioate linkage
  modified_base 19: mod_base = OTHER; note = 2'-O-methoxyethyl modified 5-methyl cytosine with phosphorothioate linkage
  modified_base 20: mod_base = OTHER; note = 2'-O-methoxyethyl modified nucleotide
tcactttcataatgctggca

SEQ ID NO: 28 - RNA, 16 nt, synthetic construct
  misc_feature 1..16: note = Synthetic oligonucleotide
  source 1..16: mol_type = other RNA
  modified_base 1: mod_base = OTHER; note = 2'-O-methoxyethyl modified 5-methyl cytosine with phosphorothioate linkage
  modified_base 2: mod_base = OTHER; note = 2'-O-methoxyethyl modified thymine with phosphorothioate linkage
  modified_base 3: mod_base = OTHER; note = 2'-O-methoxyethyl modified thymine with phosphorothioate linkage
  modified_base 4: mod_base = OTHER; note = 2'-O-methoxyethyl modified thymine with phosphorothioate linkage
  modified_base 5: mod_base = OTHER; note = 2'-O-methoxyethyl modified 5-methyl cytosine with phosphorothioate linkage
  modified_base 6: mod_base = OTHER; note = 2'-O-methoxyethyl modified nucleotide with phosphorothioate linkage
  modified_base 7: mod_base = OTHER; note = 2'-O-methoxyethyl modified thymine with phosphorothioate linkage
  modified_base 8: mod_base = OTHER; note = 2'-O-methoxyethyl modified nucleotide with phosphorothioate linkage
  modified_base 9: mod_base = OTHER; note = 2'-O-methoxyethyl modified nucleotide with phosphorothioate linkage
  modified_base 10: mod_base = OTHER; note = 2'-O-methoxyethyl modified thymine with phosphorothioate linkage
  modified_base 11: mod_base = OTHER; note = 2'-O-methoxyethyl modified nucleotide with phosphorothioate linkage
  modified_base 12: mod_base = OTHER; note = 2'-O-methoxyethyl modified 5-methyl cytosine with phosphorothioate linkage
  modified_base 13: mod_base = OTHER; note = 2'-O-methoxyethyl modified thymine with phosphorothioate linkage
  modified_base 14: mod_base = OTHER; note = 2'-O-methoxyethyl modified nucleotide with phosphorothioate linkage
  modified_base 15: mod_base = OTHER; note = 2'-O-methoxyethyl modified nucleotide with phosphorothioate linkage
  modified_base 16: mod_base = OTHER; note = 2'-O-methoxyethyl modified 5-methyl cytosine
ctttcataatgctggc

SEQ ID NO: 29 - RNA, 17 nt, synthetic construct
  misc_feature 1..17: note = Synthetic oligonucleotide
  source 1..17: mol_type = other RNA
  modified_base 1: mod_base = OTHER; note = 2'-O-methoxyethyl modified nucleotide with phosphorothioate linkage
  modified_base 2: mod_base = OTHER; note = 2'-O-methoxyethyl modified 5-methyl cytosine with phosphorothioate linkage
  modified_base 3: mod_base = OTHER; note = 2'-O-methoxyethyl modified thymine with phosphorothioate linkage
  modified_base 4: mod_base = OTHER; note = 2'-O-methoxyethyl modified thymine with phosphorothioate linkage
  modified_base 5: mod_base = OTHER; note = 2'-O-methoxyethyl modified thymine with phosphorothioate linkage
  modified_base 6: mod_base = OTHER; note = 2'-O-methoxyethyl modified 5-methyl cytosine with phosphorothioate linkage
  modified_base 7: mod_base = OTHER; note = 2'-O-methoxyethyl modified nucleotide with phosphorothioate linkage
  modified_base 8: mod_base = OTHER; note = 2'-O-methoxyethyl modified thymine with phosphorothioate linkage
  modified_base 9: mod_base = OTHER; note = 2'-O-methoxyethyl modified nucleotide with phosphorothioate linkage
  modified_base 10: mod_base = OTHER; note = 2'-O-methoxyethyl modified nucleotide with phosphorothioate linkage
  modified_base 11: mod_base = OTHER; note = 2'-O-methoxyethyl modified thymine with phosphorothioate linkage
  modified_base 12: mod_base = OTHER; note = 2'-O-methoxyethyl modified nucleotide with phosphorothioate linkage
  modified_base 13: mod_base = OTHER; note = 2'-O-methoxyethyl modified 5-methyl cytosine with phosphorothioate linkage
  modified_base 14: mod_base = OTHER; note = 2'-O-methoxyethyl modified thymine with phosphorothioate linkage
  modified_base 15: mod_base = OTHER; note = 2'-O-methoxyethyl modified nucleotide with phosphorothioate linkage
  modified_base 16: mod_base = OTHER; note = 2'-O-methoxyethyl modified nucleotide with phosphorothioate linkage
  modified_base 17: mod_base = OTHER; note = 2'-O-methoxyethyl modified 5-methyl cytosine
actttcataatgctggc

SEQ ID NO: 30 - RNA, 19 nt, synthetic construct
  misc_feature 1..19: note = Synthetic oligonucleotide
  source 1..19: mol_type = other RNA
  modified_base 1: mod_base = OTHER; note = 2'-O-methoxyethyl modified thymine with phosphorothioate linkage
  modified_base 2: mod_base = OTHER; note = 2'-O-methoxyethyl modified 5-methyl cytosine with phosphorothioate linkage
  modified_base 3: mod_base = OTHER; note = 2'-O-methoxyethyl modified nucleotide with phosphorothioate linkage
  modified_base 4: mod_base = OTHER; note = 2'-O-methoxyethyl modified 5-methyl cytosine with phosphorothioate linkage
  modified_base 5: mod_base = OTHER; note = 2'-O-methoxyethyl modified thymine with phosphorothioate linkage
  modified_base 6: mod_base = OTHER; note = 2'-O-methoxyethyl modified thymine with phosphorothioate linkage
  modified_base 7: mod_base = OTHER; note = 2'-O-methoxyethyl modified thymine with phosphorothioate linkage
  modified_base 8: mod_base = OTHER; note = 2'-O-methoxyethyl modified 5-methyl cytosine with phosphorothioate linkage
  modified_base 9: mod_base = OTHER; note = 2'-O-methoxyethyl modified nucleotide with phosphorothioate linkage
  modified_base 10: mod_base = OTHER; note = 2'-O-methoxyethyl modified thymine with phosphorothioate linkage
  modified_base 11: mod_base = OTHER; note = 2'-O-methoxyethyl modified nucleotide with phosphorothioate linkage
  modified_base 12: mod_base = OTHER; note = 2'-O-methoxyethyl modified nucleotide with phosphorothioate linkage
  modified_base 13: mod_base = OTHER; note = 2'-O-methoxyethyl modified thymine with phosphorothioate linkage
  modified_base 14: mod_base = OTHER; note = 2'-O-methoxyethyl modified nucleotide with phosphorothioate linkage
  modified_base 15: mod_base = OTHER; note = 2'-O-methoxyethyl modified 5-methyl cytosine with phosphorothioate linkage
  modified_base 16: mod_base = OTHER; note = 2'-O-methoxyethyl modified thymine with phosphorothioate linkage
  modified_base 17: mod_base = OTHER; note = 2'-O-methoxyethyl modified nucleotide with phosphorothioate linkage
  modified_base 18: mod_base = OTHER; note = 2'-O-methoxyethyl modified nucleotide with phosphorothioate linkage
  modified_base 19: mod_base = OTHER; note = 2'-O-methoxyethyl modified 5-methyl cytosine
tcactttcataatgctggc

SEQ ID NO: 31 - RNA, 16 nt, synthetic construct
  misc_feature 1..16: note = Synthetic oligonucleotide
  source 1..16: mol_type = other RNA
  modified_base 1: mod_base = OTHER; note = 2'-O-methoxyethyl modified nucleotide with phosphorothioate linkage
  modified_base 2: mod_base = OTHER; note = 2'-O-methoxyethyl modified 5-methyl cytosine with phosphorothioate linkage
  modified_base 3: mod_base = OTHER; note = 2'-O-methoxyethyl modified thymine with phosphorothioate linkage
  modified_base 4: mod_base = OTHER; note = 2'-O-methoxyethyl modified thymine with phosphorothioate linkage
  modified_base 5: mod_base = OTHER; note = 2'-O-methoxyethyl modified thymine with phosphorothioate linkage
  modified_base 6: mod_base = OTHER; note = 2'-O-methoxyethyl modified 5-methyl cytosine with phosphorothioate linkage
  modified_base 7: mod_base = OTHER; note = 2'-O-methoxyethyl modified nucleotide with phosphorothioate linkage
  modified_base 8: mod_base = OTHER; note = 2'-O-methoxyethyl modified thymine with phosphorothioate linkage
  modified_base 9: mod_base = OTHER; note = 2'-O-methoxyethyl modified nucleotide with phosphorothioate linkage
  modified_base 10: mod_base = OTHER; note = 2'-O-methoxyethyl modified nucleotide with phosphorothioate linkage
  modified_base 11: mod_base = OTHER; note = 2'-O-methoxyethyl modified thymine with phosphorothioate linkage
  modified_base 12: mod_base = OTHER; note = 2'-O-methoxyethyl modified nucleotide with phosphorothioate linkage
  modified_base 13: mod_base = OTHER; note = 2'-O-methoxyethyl modified 5-methyl cytosine with phosphorothioate linkage
  modified_base 14: mod_base = OTHER; note = 2'-O-methoxyethyl modified thymine with phosphorothioate linkage
  modified_base 15: mod_base = OTHER; note = 2'-O-methoxyethyl modified nucleotide with phosphorothioate linkage
  modified_base 16: mod_base = OTHER; note = 2'-O-methoxyethyl modified nucleotide
actttcataatgctgg

SEQ ID NO: 32 - RNA, 17 nt, synthetic construct
  misc_feature 1..17: note = Synthetic oligonucleotide
  source 1..17: mol_type = other RNA
  modified_base 1: mod_base = OTHER; note = 2'-O-methoxyethyl modified 5-methyl cytosine with phosphorothioate linkage
  modified_base 2: mod_base = OTHER; note = 2'-O-methoxyethyl modified nucleotide with phosphorothioate linkage
  modified_base 3: mod_base = OTHER; note = 2'-O-methoxyethyl modified 5-methyl cytosine with phosphorothioate linkage
  modified_base 4: mod_base = OTHER; note = 2'-O-methoxyethyl modified thymine with phosphorothioate linkage
  modified_base 5: mod_base = OTHER; note = 2'-O-methoxyethyl modified thymine with phosphorothioate linkage
  modified_base 6: mod_base = OTHER; note = 2'-O-methoxyethyl modified thymine with phosphorothioate linkage
  modified_base 7: mod_base = OTHER; note = 2'-O-methoxyethyl modified 5-methyl cytosine with phosphorothioate linkage
  modified_base 8: mod_base = OTHER; note = 2'-O-methoxyethyl modified nucleotide with phosphorothioate linkage
  modified_base 9: mod_base = OTHER; note = 2'-O-methoxyethyl modified thymine with phosphorothioate linkage
  modified_base 10: mod_base = OTHER; note = 2'-O-methoxyethyl modified nucleotide with phosphorothioate linkage
  modified_base 11: mod_base = OTHER; note = 2'-O-methoxyethyl modified nucleotide with phosphorothioate linkage
  modified_base 12: mod_base = OTHER; note = 2'-O-methoxyethyl modified thymine with phosphorothioate linkage
  modified_base 13: mod_base = OTHER; note = 2'-O-methoxyethyl modified nucleotide with phosphorothioate linkage
  modified_base 14: mod_base = OTHER; note = 2'-O-methoxyethyl modified 5-methyl cytosine with phosphorothioate linkage
  modified_base 15: mod_base = OTHER; note = 2'-O-methoxyethyl modified thymine with phosphorothioate linkage
  modified_base 16: mod_base = OTHER; note = 2'-O-methoxyethyl modified nucleotide with phosphorothioate linkage
  modified_base 17: mod_base = OTHER; note = 2'-O-methoxyethyl modified nucleotide
cactttcataatgctgg

SEQ ID NO: 33 - RNA, 19 nt, synthetic construct
  misc_feature 1..19: note = Synthetic oligonucleotide
  source 1..19: mol_type = other RNA
  modified_base 1: mod_base = OTHER; note = 2'-O-methoxyethyl modified thymine with phosphorothioate linkage
  modified_base 2: mod_base = OTHER; note = 2'-O-methoxyethyl modified thymine with phosphorothioate linkage
  modified_base 3: mod_base = OTHER; note = 2'-O-methoxyethyl modified 5-methyl cytosine with phosphorothioate linkage
  modified_base 4: mod_base = OTHER; note = 2'-O-methoxyethyl modified nucleotide with phosphorothioate linkage
  modified_base 5: mod_base = OTHER; note = 2'-O-methoxyethyl modified 5-methyl cytosine with phosphorothioate linkage
  modified_base 6: mod_base = OTHER; note = 2'-O-methoxyethyl modified thymine with phosphorothioate linkage
  modified_base 7: mod_base = OTHER; note = 2'-O-methoxyethyl modified thymine with phosphorothioate linkage
  modified_base 8: mod_base = OTHER; note = 2'-O-methoxyethyl modified thymine with phosphorothioate linkage
  modified_base 9: mod_base = OTHER; note = 2'-O-methoxyethyl modified 5-methyl cytosine with phosphorothioate linkage
  modified_base 10: mod_base = OTHER; note = 2'-O-methoxyethyl modified nucleotide with phosphorothioate linkage
  modified_base 11: mod_base = OTHER; note = 2'-O-methoxyethyl modified thymine with phosphorothioate linkage
  modified_base 12: mod_base = OTHER; note = 2'-O-methoxyethyl modified nucleotide with phosphorothioate linkage
  modified_base 13: mod_base = OTHER; note = 2'-O-methoxyethyl modified nucleotide with phosphorothioate linkage
  modified_base 14: mod_base = OTHER; note = 2'-O-methoxyethyl modified thymine with phosphorothioate linkage
  modified_base 15: mod_base = OTHER; note = 2'-O-methoxyethyl modified nucleotide with phosphorothioate linkage
  modified_base 16: mod_base = OTHER; note = 2'-O-methoxyethyl modified 5-methyl cytosine with phosphorothioate linkage
  modified_base 17: mod_base = OTHER; note = 2'-O-methoxyethyl modified thymine with phosphorothioate linkage
  modified_base 18: mod_base = OTHER; note = 2'-O-methoxyethyl modified nucleotide with phosphorothioate linkage
  modified_base 19: mod_base = OTHER; note = 2'-O-methoxyethyl modified nucleotide
ttcactttcataatgctgg

SEQ ID NO: 34 - RNA, 19 nt, synthetic construct
  misc_feature 1..19: note = Synthetic oligonucleotide
  source 1..19: mol_type = other RNA
  modified_base 1: mod_base = OTHER; note = 2'-O-methoxyethyl modified nucleotide with phosphorothioate linkage
  modified_base 2: mod_base = OTHER; note = 2'-O-methoxyethyl modified thymine with phosphorothioate linkage
  modified_base 3: mod_base = OTHER; note = 2'-O-methoxyethyl modified thymine with phosphorothioate linkage
  modified_base 4: mod_base = OTHER; note = 2'-O-methoxyethyl modified 5-methyl cytosine with phosphorothioate linkage
  modified_base 5: mod_base = OTHER; note = 2'-O-methoxyethyl modified nucleotide with phosphorothioate linkage
  modified_base 6: mod_base = OTHER; note = 2'-O-methoxyethyl modified 5-methyl cytosine with phosphorothioate linkage
  modified_base 7: mod_base = OTHER; note = 2'-O-methoxyethyl modified thymine with phosphorothioate linkage
  modified_base 8: mod_base = OTHER; note = 2'-O-methoxyethyl modified thymine with phosphorothioate linkage
  modified_base 9: mod_base = OTHER; note = 2'-O-methoxyethyl modified thymine with phosphorothioate linkage
  modified_base 10: mod_base = OTHER; note = 2'-O-methoxyethyl modified 5-methyl cytosine with phosphorothioate linkage
  modified_base 11: mod_base = OTHER; note = 2'-O-methoxyethyl modified nucleotide with phosphorothioate linkage
  modified_base 12: mod_base = OTHER; note = 2'-O-methoxyethyl modified thymine with phosphorothioate linkage
  modified_base 13: mod_base = OTHER; note = 2'-O-methoxyethyl modified nucleotide with phosphorothioate linkage
  modified_base 14: mod_base = OTHER; note = 2'-O-methoxyethyl modified nucleotide with phosphorothioate linkage
  modified_base 15: mod_base = OTHER; note = 2'-O-methoxyethyl modified thymine with phosphorothioate linkage
  modified_base 16: mod_base = OTHER; note = 2'-O-methoxyethyl modified nucleotide with phosphorothioate linkage
  modified_base 17: mod_base = OTHER; note = 2'-O-methoxyethyl modified 5-methyl cytosine with phosphorothioate linkage
  modified_base 18: mod_base = OTHER; note = 2'-O-methoxyethyl modified thymine with phosphorothioate linkage
  modified_base 19: mod_base = OTHER; note = 2'-O-methoxyethyl modified nucleotide
attcactttcataatgctg

SEQ ID NO: 35 - RNA, 20 nt, synthetic construct
  misc_feature 1..20: note = Synthetic oligonucleotide
  source 1..20: mol_type = other RNA
  modified_base 1: mod_base = OTHER; note = 2'-O-methoxyethyl modified nucleotide with phosphorothioate linkage
  modified_base 2: mod_base = OTHER; note = 2'-O-methoxyethyl modified nucleotide with phosphorothioate linkage
  modified_base 3: mod_base = OTHER; note = 2'-O-methoxyethyl modified nucleotide with phosphorothioate linkage
  modified_base 4: mod_base = OTHER; note = 2'-O-methoxyethyl modified thymine with phosphorothioate linkage
  modified_base 5: mod_base = OTHER; note = 2'-O-methoxyethyl modified thymine with phosphorothioate linkage
  modified_base 6: mod_base = OTHER; note = 2'-O-methoxyethyl modified 5-methyl cytosine with phosphorothioate linkage
  modified_base 7: mod_base = OTHER; note = 2'-O-methoxyethyl modified nucleotide with phosphorothioate linkage
  modified_base 8: mod_base = OTHER; note = 2'-O-methoxyethyl modified 5-methyl cytosine with phosphorothioate linkage
  modified_base 9: mod_base = OTHER; note = 2'-O-methoxyethyl modified thymine with phosphorothioate linkage
  modified_base 10: mod_base = OTHER; note = 2'-O-methoxyethyl modified thymine with phosphorothioate linkage
  modified_base 11: mod_base = OTHER; note = 2'-O-methoxyethyl modified thymine with phosphorothioate linkage
  modified_base 12: mod_base = OTHER; note = 2'-O-methoxyethyl modified 5-methyl cytosine with phosphorothioate linkage
  modified_base 13: mod_base = OTHER; note = 2'-O-methoxyethyl modified nucleotide with phosphorothioate linkage
  modified_base 14: mod_base = OTHER; note = 2'-O-methoxyethyl modified thymine with phosphorothioate linkage
  modified_base 15: mod_base = OTHER; note = 2'-O-methoxyethyl modified nucleotide with phosphorothioate linkage
  modified_base 16: mod_base = OTHER; note = 2'-O-methoxyethyl modified nucleotide with phosphorothioate linkage
  modified_base 17: mod_base = OTHER; note = 2'-O-methoxyethyl modified thymine with phosphorothioate linkage
  modified_base 18: mod_base = OTHER; note = 2'-O-methoxyethyl modified nucleotide with phosphorothioate linkage
  modified_base 19: mod_base = OTHER; note = 2'-O-methoxyethyl modified 5-methyl cytosine with phosphorothioate linkage
  modified_base 20: mod_base = OTHER; note = 2'-O-methoxyethyl modified thymine
agattcactttcataatgct

SEQ ID NO: 36 - RNA, 19 nt, synthetic construct
  misc_feature 1..19: note = Synthetic oligonucleotide
  source 1..19: mol_type = other RNA
  modified_base 1: mod_base = OTHER; note = 2'-O-methoxyethyl modified thymine with phosphorothioate linkage
  modified_base 2: mod_base = OTHER; note = 2'-O-methoxyethyl modified 5-methyl cytosine with phosphorothioate linkage
  modified_base 3: mod_base = OTHER; note = 2'-O-methoxyethyl modified nucleotide with phosphorothioate linkage
  modified_base 4: mod_base = OTHER; note = 2'-O-methoxyethyl modified 5-methyl cytosine with phosphorothioate linkage
  modified_base 5: mod_base = OTHER; note = 2'-O-methoxyethyl modified thymine with phosphorothioate linkage
  modified_base 6: mod_base = OTHER; note = 2'-O-methoxyethyl modified thymine with phosphorothioate linkage
  modified_base 7: mod_base = OTHER; note = 2'-O-methoxyethyl modified thymine with phosphorothioate linkage
  modified_base 8: mod_base = OTHER; note = 2'-O-methoxyethyl modified 5-methyl cytosine with phosphorothioate linkage
  modified_base 9: mod_base = OTHER; note = 2'-O-methoxyethyl modified nucleotide with phosphorothioate linkage
  modified_base 10: mod_base = OTHER; note = 2'-O-methoxyethyl modified thymine with phosphorothioate linkage
  modified_base 11: mod_base = OTHER; note = 2'-O-methoxyethyl modified nucleotide with phosphorothioate linkage
  modified_base 12: mod_base = OTHER; note = 2'-O-methoxyethyl modified nucleotide with phosphorothioate linkage
  modified_base 13: mod_base = OTHER; note = 2'-O-methoxyethyl modified thymine with phosphorothioate linkage
  modified_base 14: mod_base = OTHER; note = 2'-O-methoxyethyl modified nucleotide with phosphorothioate linkage
  modified_base 15: mod_base = OTHER; note = 2'-O-methoxyethyl modified 5-methyl cytosine with phosphorothioate linkage
  modified_base 16: mod_base = OTHER; note = 2'-O-methoxyethyl modified thymine with phosphorothioate linkage
  modified_base 17: mod_base = OTHER; note = 2'-O-methoxyethyl modified nucleotide with phosphorothioate linkage
  modified_base 18: mod_base = OTHER; note = 2'-O-methoxyethyl modified nucleotide with phosphorothioate linkage
  modified_base 19: mod_base = OTHER; note = 2'-O-methoxyethyl modified thymine
tcactttcataatgctggt

SEQ ID NO: 37 - RNA, 19 nt, synthetic construct
  misc_feature 1..19: note = Synthetic oligonucleotide
  source 1..19: mol_type = other RNA
  modified_base 1: mod_base = OTHER; note = 2'-O-methoxyethyl modified thymine with phosphorothioate linkage
  modified_base 2: mod_base = OTHER; note = 2'-O-methoxyethyl modified 5-methyl cytosine with phosphorothioate linkage
  modified_base 3: mod_base = OTHER; note = 2'-O-methoxyethyl modified nucleotide with phosphorothioate linkage
  modified_base 4: mod_base = OTHER; note = 2'-O-methoxyethyl modified 5-methyl cytosine with phosphorothioate linkage
  modified_base 5: mod_base = OTHER; note = 2'-O-methoxyethyl modified thymine with phosphorothioate linkage
  modified_base 6: mod_base = OTHER; note = 2'-O-methoxyethyl modified thymine with phosphorothioate linkage
  modified_base 7: mod_base = OTHER; note = 2'-O-methoxyethyl modified thymine with phosphorothioate linkage
  modified_base 8: mod_base = OTHER; note = 2'-O-methoxyethyl modified 5-methyl cytosine with phosphorothioate linkage
  modified_base 9: mod_base = OTHER; note = 2'-O-methoxyethyl modified nucleotide with phosphorothioate linkage
  modified_base 10: mod_base = OTHER; note = 2'-O-methoxyethyl modified thymine with phosphorothioate linkage
  modified_base 11: mod_base = OTHER; note = 2'-O-methoxyethyl modified nucleotide with phosphorothioate linkage
  modified_base 12: mod_base = OTHER; note = 2'-O-methoxyethyl modified nucleotide with phosphorothioate linkage
  modified_base 13: mod_base = OTHER; note = 2'-O-methoxyethyl modified thymine with phosphorothioate linkage
  modified_base 14: mod_base = OTHER; note = 2'-O-methoxyethyl modified nucleotide with phosphorothioate linkage
  modified_base 15: mod_base = OTHER; note = 2'-O-methoxyethyl modified 5-methyl cytosine with phosphorothioate linkage
  modified_base 16: mod_base = OTHER; note = 2'-O-methoxyethyl modified thymine with phosphorothioate linkage
  modified_base 17: mod_base = OTHER; note = 2'-O-methoxyethyl modified nucleotide with phosphorothioate linkage
  modified_base 18: mod_base = OTHER; note = 2'-O-methoxyethyl modified nucleotide with phosphorothioate linkage
  modified_base 19: mod_base = OTHER; note = 2'-O-methoxyethyl modified nucleotide
tcactttcataatgctgga

SEQ ID NO: 38 - RNA, 19 nt, synthetic construct
  misc_feature 1..19: note = Synthetic oligonucleotide
  misc_feature 19: note = bases at these positions are RNA
  source 1..19: mol_type = other RNA
  modified_base 1: mod_base = OTHER; note = 2'-O-methoxyethyl modified thymine with phosphorothioate linkage
  modified_base 2: mod_base = OTHER; note = 2'-O-methoxyethyl modified 5-methyl cytosine with phosphorothioate linkage
  modified_base 3: mod_base = OTHER; note = 2'-O-methoxyethyl modified nucleotide with phosphorothioate linkage
  modified_base 4: mod_base = OTHER; note = 2'-O-methoxyethyl modified 5-methyl cytosine with phosphorothioate linkage
  modified_base 5: mod_base = OTHER; note = 2'-O-methoxyethyl modified thymine with phosphorothioate linkage
  modified_base 6: mod_base = OTHER; note = 2'-O-methoxyethyl modified thymine with phosphorothioate linkage
  modified_base 7: mod_base = OTHER; note = 2'-O-methoxyethyl modified thymine with phosphorothioate linkage
  modified_base 8: mod_base = OTHER; note = 2'-O-methoxyethyl modified 5-methyl cytosine with phosphorothioate linkage
  modified_base 9: mod_base = OTHER; note = 2'-O-methoxyethyl modified nucleotide with phosphorothioate linkage
  modified_base 10: mod_base = OTHER; note = 2'-O-methoxyethyl modified thymine with phosphorothioate linkage
  modified_base 11: mod_base = OTHER; note = 2'-O-methoxyethyl modified nucleotide with phosphorothioate linkage
  modified_base 12: mod_base = OTHER; note = 2'-O-methoxyethyl modified nucleotide with phosphorothioate linkage
  modified_base 13: mod_base = OTHER; note = 2'-O-methoxyethyl modified thymine with phosphorothioate linkage
  modified_base 14: mod_base = OTHER; note = 2'-O-methoxyethyl modified nucleotide with phosphorothioate linkage
  modified_base 15: mod_base = OTHER; note = 2'-O-methoxyethyl modified 5-methyl cytosine with phosphorothioate linkage
  modified_base 16: mod_base = OTHER; note = 2'-O-methoxyethyl modified thymine with phosphorothioate linkage
  modified_base 17: mod_base = OTHER; note = 2'-O-methoxyethyl modified nucleotide with phosphorothioate linkage
  modified_base 18: mod_base = OTHER; note = 2'-O-methoxyethyl modified nucleotide
  modified_base 19: mod_base = OTHER; note = 2'-O-methyl modified nucleotide
tcactttcataatgctggt

SEQ ID NO: 39 - DNA, 20 bp, synthetic construct
  misc_feature 1..20: note = Synthetic oligonucleotide
  source 1..20: mol_type = other DNA
  modified_base 1: mod_base = OTHER; note = 2'-O-N-methyl acetamide modified thymine with phosphorothioate linkage
  modified_base 2: mod_base = OTHER; note = 2'-O-N-methyl acetamide modified 5-methyl cytosine with phosphorothioate linkage
  modified_base 3: mod_base = OTHER; note = 2'-O-N-methyl acetamide modified nucleotide with phosphorothioate linkage
  modified_base 4: mod_base = OTHER; note = 2'-O-N-methyl acetamide modified 5-methyl cytosine with phosphorothioate linkage
  modified_base 5: mod_base = OTHER; note = 2'-O-N-methyl acetamide modified thymine with phosphorothioate linkage
  modified_base 6: mod_base = OTHER; note = 2'-O-N-methyl acetamide modified thymine with phosphorothioate linkage
  modified_base 7: mod_base = OTHER; note = 2'-O-N-methyl acetamide modified thymine with phosphorothioate linkage
  modified_base 8: mod_base = OTHER; note = 2'-O-N-methyl acetamide modified 5-methyl cytosine with phosphorothioate linkage
  modified_base 9: mod_base = OTHER; note = 2'-O-N-methyl acetamide modified nucleotide with phosphorothioate linkage
  modified_base 10: mod_base = OTHER; note = 2'-O-N-methyl acetamide modified thymine with phosphorothioate linkage
  modified_base 11: mod_base = OTHER; note = 2'-O-N-methyl acetamide modified nucleotide with phosphorothioate linkage
  modified_base 12: mod_base = OTHER; note = 2'-O-N-methyl acetamide modified nucleotide with phosphorothioate linkage
  modified_base 13: mod_base = OTHER; note = 2'-O-N-methyl acetamide modified thymine with phosphorothioate linkage
  modified_base 14: mod_base = OTHER; note = 2'-O-N-methyl acetamide modified nucleotide with phosphorothioate linkage
  modified_base 15: mod_base = OTHER; note = 2'-O-N-methyl acetamide modified 5-methyl cytosine with phosphorothioate linkage
  modified_base 16: mod_base = OTHER; note = 2'-O-N-methyl acetamide modified thymine with phosphorothioate linkage
  modified_base 17: mod_base = OTHER; note = 2'-O-N-methyl acetamide modified nucleotide with phosphorothioate linkage
  modified_base 18: mod_base = OTHER; note = 2'-O-N-methyl acetamide modified nucleotide
  misc_feature 1..18: note = RNA
  misc_feature 19..20: note = DNA
tcactttcataatgctggaa

SEQ ID NO: 40 - DNA, 20 bp, synthetic construct
  misc_feature 1..20: note = Synthetic oligonucleotide
  source 1..20: mol_type = other DNA
  modified_base 1: mod_base = OTHER; note = 2'-O-methoxyethyl modified thymine with phosphorothioate linkage
  modified_base 2: mod_base = OTHER; note = 2'-O-methoxyethyl modified 5-methyl cytosine with phosphorothioate linkage
  modified_base 3: mod_base = OTHER; note = 2'-O-methoxyethyl modified nucleotide with phosphorothioate linkage
  modified_base 4: mod_base = OTHER; note = 2'-O-methoxyethyl modified 5-methyl cytosine with phosphorothioate linkage
  modified_base 5: mod_base = OTHER; note = 2'-O-methoxyethyl modified thymine with phosphorothioate linkage
  modified_base 6: mod_base = OTHER; note = 2'-O-methoxyethyl modified thymine with phosphorothioate linkage
  modified_base 7: mod_base = OTHER; note = 2'-O-methoxyethyl modified thymine with phosphorothioate linkage
  modified_base 8: mod_base = OTHER; note = 2'-O-methoxyethyl modified 5-methyl cytosine with phosphorothioate linkage
  modified_base 9: mod_base = OTHER; note = 2'-O-methoxyethyl modified nucleotide with phosphorothioate linkage
  modified_base 10: mod_base = OTHER; note = 2'-O-methoxyethyl modified thymine with phosphorothioate linkage
  modified_base 11: mod_base = OTHER; note = 2'-O-methoxyethyl modified nucleotide with phosphorothioate linkage
  modified_base 12: mod_base = OTHER; note = 2'-O-methoxyethyl modified nucleotide with phosphorothioate linkage
  modified_base 13: mod_base = OTHER; note = 2'-O-methoxyethyl modified thymine with phosphorothioate linkage
  modified_base 14: mod_base = OTHER; note = 2'-O-methoxyethyl modified nucleotide with phosphorothioate linkage
  modified_base 15: mod_base = OTHER; note = 2'-O-methoxyethyl modified 5-methyl cytosine with phosphorothioate linkage
  modified_base 16: mod_base = OTHER; note = 2'-O-methoxyethyl modified thymine with phosphorothioate linkage
  modified_base 17: mod_base = OTHER; note = 2'-O-methoxyethyl modified nucleotide with phosphorothioate linkage
  modified_base 18: mod_base = OTHER; note = 2'-O-methoxyethyl modified nucleotide
  misc_feature 1..18: note = RNA
  misc_feature 19..20: note = DNA
tcactttcataatgctggat

SEQ ID NO: 41 - DNA, 20 bp, synthetic construct
  misc_feature 1..20: note = Synthetic oligonucleotide
  source 1..20: mol_type = other DNA
  modified_base 1: mod_base = OTHER; note = 2'-O-methoxyethyl modified thymine with phosphorothioate linkage
  modified_base 2: mod_base = OTHER; note = 2'-O-methoxyethyl modified 5-methyl cytosine with phosphorothioate linkage
  modified_base 3: mod_base = OTHER; note = 2'-O-methoxyethyl modified nucleotide with phosphorothioate linkage
  modified_base 4: mod_base = OTHER; note = 2'-O-methoxyethyl modified 5-methyl cytosine with phosphorothioate linkage
  modified_base 5: mod_base = OTHER; note = 2'-O-methoxyethyl modified thymine with phosphorothioate linkage
  modified_base 6: mod_base = OTHER; note = 2'-O-methoxyethyl modified thymine with phosphorothioate linkage
  modified_base 7: mod_base = OTHER; note = 2'-O-methoxyethyl modified thymine with phosphorothioate linkage
  modified_base 8: mod_base = OTHER; note = 2'-O-methoxyethyl modified 5-methyl cytosine with phosphorothioate linkage
  modified_base 9: mod_base = OTHER; note = 2'-O-methoxyethyl modified nucleotide with phosphorothioate linkage
  modified_base 10: mod_base = OTHER; note = 2'-O-methoxyethyl modified thymine with phosphorothioate linkage
  modified_base 11: mod_base = OTHER; note = 2'-O-methoxyethyl modified nucleotide with phosphorothioate linkage
  modified_base 12: mod_base = OTHER; note = 2'-O-methoxyethyl modified nucleotide with phosphorothioate linkage
  modified_base 13: mod_base = OTHER; note = 2'-O-methoxyethyl modified thymine with phosphorothioate linkage
  modified_base 14: mod_base = OTHER; note = 2'-O-methoxyethyl modified nucleotide with phosphorothioate linkage
  modified_base 15: mod_base = OTHER; note = 2'-O-methoxyethyl modified 5-methyl cytosine with phosphorothioate linkage
  modified_base 16: mod_base = OTHER; note = 2'-O-methoxyethyl modified thymine with phosphorothioate linkage
  modified_base 17: mod_base = OTHER; note = 2'-O-methoxyethyl modified nucleotide with phosphorothioate linkage
  modified_base 18: mod_base = OTHER; note = 2'-O-methoxyethyl modified nucleotide
  modified_base 20: mod_base = OTHER; note = 5-methyl cytosine
  misc_feature 1..18: note = RNA
  misc_feature 19..20: note = DNA
tcactttcataatgctggac

SEQ ID NO: 42 - DNA, 20 bp, synthetic construct
  misc_feature 1..20: note = Synthetic oligonucleotide
  source 1..20: mol_type = other DNA
  modified_base 1: mod_base = OTHER; note = 2'-O-methoxyethyl modified thymine with phosphorothioate linkage
  modified_base 2: mod_base = OTHER; note = 2'-O-methoxyethyl modified 5-methyl cytosine with phosphorothioate linkage
  modified_base 3: mod_base = OTHER; note = 2'-O-methoxyethyl modified nucleotide with phosphorothioate linkage
  modified_base 4: mod_base = OTHER; note = 2'-O-methoxyethyl modified 5-methyl cytosine with phosphorothioate linkage
  modified_base 5: mod_base = OTHER; note = 2'-O-methoxyethyl modified thymine with phosphorothioate linkage
  modified_base 6: mod_base = OTHER; note = 2'-O-methoxyethyl modified thymine with phosphorothioate linkage
  modified_base 7: mod_base = OTHER; note = 2'-O-methoxyethyl modified thymine with phosphorothioate linkage
  modified_base 8: mod_base = OTHER; note = 2'-O-methoxyethyl modified 5-methyl cytosine with phosphorothioate linkage
  modified_base 9: mod_base = OTHER; note = 2'-O-methoxyethyl modified nucleotide with phosphorothioate linkage
  modified_base 10: mod_base = OTHER; note = 2'-O-methoxyethyl modified thymine with phosphorothioate linkage
  modified_base 11: mod_base = OTHER; note = 2'-O-methoxyethyl modified nucleotide with phosphorothioate linkage
  modified_base 12: mod_base = OTHER; note = 2'-O-methoxyethyl modified nucleotide with phosphorothioate linkage
  modified_base 13: mod_base = OTHER; note = 2'-O-methoxyethyl modified thymine with phosphorothioate linkage
  modified_base 14: mod_base = OTHER; note = 2'-O-methoxyethyl modified nucleotide with phosphorothioate linkage
  modified_base 15: mod_base = OTHER; note = 2'-O-methoxyethyl modified 5-methyl cytosine with phosphorothioate linkage
  modified_base 16: mod_base = OTHER; note = 2'-O-methoxyethyl modified thymine with phosphorothioate linkage
  modified_base 17: mod_base = OTHER; note = 2'-O-methoxyethyl modified nucleotide with phosphorothioate linkage
  modified_base 18: mod_base = OTHER; note = 2'-O-methoxyethyl modified nucleotide
  modified_base 20: mod_base = OTHER; note = 5-methyl cytosine
  misc_feature 1..18: note = RNA
  misc_feature 19..20: note = DNA
tcactttcataatgctggtc

SEQ ID NO: 43 - DNA, 20 bp, synthetic construct
  misc_feature 1..20: note = Synthetic oligonucleotide
  source 1..20: mol_type = other DNA
  modified_base 1: mod_base = OTHER; note = 2'-O-methoxyethyl modified thymine with phosphorothioate linkage
  modified_base 2: mod_base = OTHER; note = 2'-O-methoxyethyl modified 5-methyl cytosine with phosphorothioate linkage
  modified_base 3: mod_base = OTHER; note = 2'-O-methoxyethyl modified nucleotide with phosphorothioate linkage
  modified_base 4: mod_base = OTHER; note = 2'-O-methoxyethyl modified 5-methyl cytosine with phosphorothioate linkage
  modified_base 5: mod_base = OTHER; note = 2'-O-methoxyethyl modified thymine with phosphorothioate linkage
  modified_base 6: mod_base = OTHER; note = 2'-O-methoxyethyl modified thymine with phosphorothioate linkage
  modified_base 7: mod_base = OTHER; note = 2'-O-methoxyethyl modified thymine with phosphorothioate linkage
  modified_base 8: mod_base = OTHER; note = 2'-O-methoxyethyl modified 5-methyl cytosine with phosphorothioate linkage
  modified_base 9: mod_base = OTHER; note = 2'-O-methoxyethyl modified nucleotide with phosphorothioate linkage
  modified_base 10: mod_base = OTHER; note = 2'-O-methoxyethyl modified thymine with phosphorothioate linkage
  modified_base 11: mod_base = OTHER; note = 2'-O-methoxyethyl modified nucleotide with phosphorothioate linkage
  modified_base 12: mod_base = OTHER; note = 2'-O-methoxyethyl modified nucleotide with phosphorothioate linkage
  modified_base 13: mod_base = OTHER; note = 2'-O-methoxyethyl modified thymine with phosphorothioate linkage
  modified_base 14: mod_base = OTHER; note = 2'-O-methoxyethyl modified nucleotide with phosphorothioate linkage
  modified_base 15: mod_base = OTHER; note = 2'-O-methoxyethyl modified 5-methyl cytosine with phosphorothioate linkage
  modified_base 16: mod_base = OTHER; note = 2'-O-methoxyethyl modified thymine with phosphorothioate linkage
  modified_base 17: mod_base = OTHER; note = 2'-O-methoxyethyl modified nucleotide with phosphorothioate linkage
  modified_base 18: mod_base = OTHER; note = 2'-O-methoxyethyl modified nucleotide
  misc_feature 1..18: note = RNA
  misc_feature 19..20: note = DNA
tcactttcataatgctggtt

SEQ ID NO: 44 - DNA, 20 bp, synthetic construct
  misc_feature 1..20: note = Synthetic oligonucleotide
  source 1..20: mol_type = other DNA
  modified_base 1: mod_base = OTHER; note = 2'-O-methoxyethyl modified thymine with phosphorothioate linkage
  modified_base 2: mod_base = OTHER; note = 2'-O-methoxyethyl modified 5-methyl cytosine with phosphorothioate linkage
  modified_base 3: mod_base = OTHER; note = 2'-O-methoxyethyl modified nucleotide with phosphorothioate linkage
  modified_base 4: mod_base = OTHER; note = 2'-O-methoxyethyl modified 5-methyl cytosine with phosphorothioate linkage
  modified_base 5: mod_base = OTHER; note = 2'-O-methoxyethyl modified thymine with phosphorothioate linkage
  modified_base 6: mod_base = OTHER; note = 2'-O-methoxyethyl modified thymine with phosphorothioate linkage
  modified_base 7: mod_base = OTHER; note = 2'-O-methoxyethyl modified thymine with phosphorothioate linkage
  modified_base 8: mod_base = OTHER; note = 2'-O-methoxyethyl modified 5-methyl cytosine with phosphorothioate linkage
  modified_base 9: mod_base = OTHER; note = 2'-O-methoxyethyl modified nucleotide with phosphorothioate linkage
  modified_base 10: mod_base = OTHER; note = 2'-O-methoxyethyl modified thymine with phosphorothioate linkage
  modified_base 11: mod_base = OTHER; note = 2'-O-methoxyethyl modified nucleotide with phosphorothioate linkage
  modified_base 12: mod_base = OTHER; note = 2'-O-methoxyethyl modified nucleotide with phosphorothioate linkage
  modified_base 13: mod_base = OTHER; note = 2'-O-methoxyethyl modified thymine with phosphorothioate linkage
  modified_base 14: mod_base = OTHER; note = 2'-O-methoxyethyl modified nucleotide with phosphorothioate linkage
  modified_base 15: mod_base = OTHER; note = 2'-O-methoxyethyl modified 5-methyl cytosine with phosphorothioate linkage
  modified_base 16: mod_base = OTHER; note = 2'-O-methoxyethyl modified thymine with phosphorothioate linkage
  modified_base 17: mod_base = OTHER; note = 2'-O-methoxyethyl modified nucleotide with phosphorothioate linkage
  modified_base 18: mod_base = OTHER; note = 2'-O-methoxyethyl modified nucleotide
  misc_feature 1..18: note = RNA
  misc_feature 19..20: note = DNA
tcactttcataatgctggta

SEQ ID NO: 45 - DNA, 20 bp, synthetic construct
  misc_feature 1..20: note = Synthetic oligonucleotide
  source 1..20: mol_type = other DNA
  modified_base 1: mod_base = OTHER; note = 2'-O-methoxyethyl modified thymine with phosphorothioate linkage
  modified_base 2: mod_base = OTHER; note = 2'-O-methoxyethyl modified 5-methyl cytosine with phosphorothioate linkage
  modified_base 3: mod_base = OTHER; note = 2'-O-methoxyethyl modified nucleotide with phosphorothioate linkage
  modified_base 4: mod_base = OTHER; note = 2'-O-methoxyethyl modified 5-methyl cytosine with phosphorothioate linkage
  modified_base 5: mod_base = OTHER; note = 2'-O-methoxyethyl modified thymine with phosphorothioate linkage
  modified_base 6: mod_base = OTHER; note = 2'-O-methoxyethyl modified thymine with phosphorothioate linkage
  modified_base 7: mod_base = OTHER; note = 2'-O-methoxyethyl modified thymine with phosphorothioate linkage
  modified_base 8: mod_base = OTHER; note = 2'-O-methoxyethyl modified 5-methyl cytosine with phosphorothioate linkage
  modified_base 9: mod_base = OTHER; note = 2'-O-methoxyethyl modified nucleotide with phosphorothioate linkage
  modified_base 10: mod_base = OTHER; note = 2'-O-methoxyethyl modified thymine with phosphorothioate linkage
  modified_base 11: mod_base = OTHER; note = 2'-O-methoxyethyl modified nucleotide with phosphorothioate linkage
  modified_base 12: mod_base = OTHER; note = 2'-O-methoxyethyl modified nucleotide with phosphorothioate linkage
  modified_base 13: mod_base = OTHER; note = 2'-O-methoxyethyl modified thymine with phosphorothioate linkage
  modified_base 14: mod_base = OTHER; note = 2'-O-methoxyethyl modified nucleotide with phosphorothioate linkage
  modified_base 15: mod_base = OTHER; note = 2'-O-methoxyethyl modified 5-methyl cytosine with phosphorothioate linkage
  modified_base 16: mod_base = OTHER; note = 2'-O-methoxyethyl modified thymine with phosphorothioate linkage
  modified_base 17: mod_base = OTHER; note = 2'-O-methoxyethyl modified nucleotide with phosphorothioate linkage
  modified_base 18: mod_base = OTHER; note = 2'-O-methoxyethyl modified nucleotide
  modified_base 19: mod_base = OTHER; note = 5-methyl cytosine
  modified_base 20: mod_base = OTHER; note = 5-methyl cytosine
  misc_feature 1..18: note = RNA
  misc_feature 19..20: note = DNA
tcactttcataatgctggcc

SEQ ID NO: 46 - DNA, 20 bp, synthetic construct
  misc_feature 1..20: note = Synthetic oligonucleotide
  source 1..20: mol_type = other DNA
  modified_base 1: mod_base = OTHER; note = 2'-O-methoxyethyl modified thymine with phosphorothioate linkage
  modified_base 2: mod_base = OTHER; note = 2'-O-methoxyethyl modified 5-methyl cytosine with phosphorothioate linkage
  modified_base 3: mod_base = OTHER; note = 2'-O-methoxyethyl modified nucleotide with phosphorothioate linkage
  modified_base 4: mod_base = OTHER; note = 2'-O-methoxyethyl modified 5-methyl cytosine with phosphorothioate linkage
  modified_base 5: mod_base = OTHER; note = 2'-O-methoxyethyl modified thymine with phosphorothioate linkage
  modified_base 6: mod_base = OTHER; note = 2'-O-methoxyethyl modified thymine with phosphorothioate linkage
  modified_base 7: mod_base = OTHER; note = 2'-O-methoxyethyl modified thymine with phosphorothioate linkage
  modified_base 8: mod_base = OTHER; note = 2'-O-methoxyethyl modified 5-methyl cytosine with phosphorothioate linkage
  modified_base 9: mod_base = OTHER; note = 2'-O-methoxyethyl modified nucleotide with phosphorothioate linkage
  modified_base 10: mod_base = OTHER; note = 2'-O-methoxyethyl modified thymine with phosphorothioate linkage
  modified_base 11: mod_base = OTHER; note = 2'-O-methoxyethyl modified nucleotide with phosphorothioate linkage
  modified_base 12: mod_base = OTHER; note = 2'-O-methoxyethyl modified nucleotide with phosphorothioate linkage
  modified_base 13: mod_base = OTHER; note = 2'-O-methoxyethyl modified thymine with phosphorothioate linkage
  modified_base 14: mod_base = OTHER; note = 2'-O-methoxyethyl modified nucleotide with phosphorothioate linkage
  modified_base 15: mod_base = OTHER; note = 2'-O-methoxyethyl modified 5-methyl cytosine with phosphorothioate linkage
  modified_base 16: mod_base = OTHER; note = 2'-O-methoxyethyl modified thymine with phosphorothioate linkage
  modified_base 17: mod_base = OTHER; note = 2'-O-methoxyethyl modified nucleotide with phosphorothioate linkage
  modified_base 18: mod_base = OTHER; note = 2'-O-methoxyethyl modified nucleotide
  modified_base 19: mod_base = OTHER; note = 5-methyl cytosine
  misc_feature 1..18: note = RNA
  misc_feature 19..20: note = DNA
tcactttcataatgctggct

SEQ ID NO: 47 - RNA, 19 nt, synthetic construct
  misc_feature 1..19: note = Synthetic oligonucleotide
  source 1..19: mol_type = other RNA
  modified_base 1: mod_base = OTHER; note = 2'-O-methoxyethyl modified 5-methyl cytosine
  modified_base 2: mod_base = OTHER; note = 2'-O-N-methyl acetamide modified thymine with phosphorothioate linkage
  modified_base 3: mod_base = OTHER; note = 2'-O-N-methyl acetamide modified 5-methyl cytosine with phosphorothioate linkage
  modified_base 4: mod_base = OTHER; note = 2'-O-N-methyl acetamide modified nucleotide with phosphorothioate linkage
  modified_base 5: mod_base = OTHER; note = 2'-O-N-methyl acetamide modified 5-methyl cytosine with phosphorothioate linkage
  modified_base 6: mod_base = OTHER; note = 2'-O-N-methyl acetamide modified thymine with phosphorothioate linkage
  modified_base 7: mod_base = OTHER; note = 2'-O-N-methyl acetamide modified thymine with phosphorothioate linkage
  modified_base 8: mod_base = OTHER; note = 2'-O-N-methyl acetamide modified thymine with phosphorothioate linkage
  modified_base 9: mod_base = OTHER; note = 2'-O-N-methyl acetamide modified 5-methyl cytosine with phosphorothioate linkage
  modified_base 10: mod_base = OTHER; note = 2'-O-N-methyl acetamide modified nucleotide with phosphorothioate linkage
  modified_base 11: mod_base = OTHER; note = 2'-O-N-methyl acetamide modified thymine with phosphorothioate linkage
  modified_base 12: mod_base = OTHER; note = 2'-O-N-methyl acetamide modified nucleotide with phosphorothioate linkage
  modified_base 13: mod_base = OTHER; note = 2'-O-N-methyl acetamide modified nucleotide with phosphorothioate linkage
  modified_base 14: mod_base = OTHER; note = 2'-O-N-methyl acetamide modified thymine with phosphorothioate linkage
  modified_base 15: mod_base = OTHER; note = 2'-O-N-methyl acetamide modified nucleotide with phosphorothioate linkage
  modified_base 16: mod_base = OTHER; note = 2'-O-N-methyl acetamide modified 5-methyl cytosine with phosphorothioate linkage
  modified_base 17: mod_base = OTHER; note = 2'-O-N-methyl acetamide modified thymine with phosphorothioate linkage
  modified_base 18: mod_base = OTHER; note = 2'-O-N-methyl acetamide modified nucleotide with phosphorothioate linkage
  modified_base 19: mod_base = OTHER; note = 2'-O-N-methyl acetamide modified nucleotide
ctcactttcataatgctgg

SEQ ID NO: 48 - RNA, 19 nt, synthetic construct
  misc_feature 1..19: note = Synthetic oligonucleotide
  source 1..19: mol_type = other RNA
  modified_base 1: mod_base = OTHER; note = 2'-O-methoxyethyl modified nucleotide
  modified_base 2: mod_base = OTHER; note = 2'-O-N-methyl acetamide modified thymine with phosphorothioate linkage
  modified_base 3: mod_base = OTHER; note = 2'-O-N-methyl acetamide modified 5-methyl cytosine with phosphorothioate linkage
  modified_base 4: mod_base = OTHER; note = 2'-O-N-methyl acetamide modified nucleotide with phosphorothioate linkage
  modified_base 5: mod_base = OTHER; note = 2'-O-N-methyl acetamide modified 5-methyl cytosine with phosphorothioate linkage
  modified_base 6: mod_base = OTHER; note = 2'-O-N-methyl acetamide modified thymine with phosphorothioate linkage
  modified_base 7: mod_base = OTHER; note = 2'-O-N-methyl acetamide modified thymine with phosphorothioate linkage
  modified_base 8: mod_base = OTHER; note = 2'-O-N-methyl acetamide modified thymine with phosphorothioate linkage
  modified_base 9: mod_base = OTHER; note = 2'-O-N-methyl acetamide modified 5-methyl cytosine with phosphorothioate linkage
  modified_base 10: mod_base = OTHER; note = 2'-O-N-methyl acetamide modified nucleotide with phosphorothioate linkage
  modified_base 11: mod_base = OTHER; note = 2'-O-N-methyl acetamide modified thymine with phosphorothioate linkage
  modified_base 12: mod_base = OTHER; note = 2'-O-N-methyl acetamide modified nucleotide with phosphorothioate linkage
  modified_base 13: mod_base = OTHER; note = 2'-O-N-methyl acetamide modified nucleotide with phosphorothioate linkage
  modified_base 14: mod_base = OTHER; note = 2'-O-N-methyl acetamide modified thymine with phosphorothioate linkage
  modified_base 15: mod_base = OTHER; note = 2'-O-N-methyl acetamide modified nucleotide with phosphorothioate linkage
  modified_base 16: mod_base = OTHER; note = 2'-O-N-methyl acetamide modified 5-methyl cytosine with phosphorothioate linkage
  modified_base 17: mod_base = OTHER; note = 2'-O-N-methyl acetamide modified thymine with phosphorothioate linkage
  modified_base 18: mod_base = OTHER; note = 2'-O-N-methyl acetamide modified nucleotide with phosphorothioate linkage
  modified_base 19: mod_base = OTHER; note = 2'-O-N-methyl acetamide modified nucleotide
atcactttcataatgctgg

SEQ ID NO: 49 - RNA, 20 nt, synthetic construct
  misc_feature 1..20: note = Synthetic oligonucleotide
  source 1..20: mol_type = other RNA
  modified_base 1: mod_base = OTHER; note = 2'-O-methoxyethyl modified nucleotide with phosphorothioate linkage
  modified_base 2: mod_base = OTHER; note = 2'-O-methoxyethyl modified nucleotide with phosphorothioate linkage
  modified_base 3: mod_base = OTHER; note = 2'-O-methoxyethyl modified thymine with phosphorothioate linkage
  modified_base 4: mod_base = OTHER; note = 2'-O-methoxyethyl modified thymine with phosphorothioate linkage
  modified_base 5: mod_base = OTHER; note = 2'-O-methoxyethyl modified 5-methyl cytosine with phosphorothioate linkage
  modified_base 6: mod_base = OTHER; note = 2'-O-methoxyethyl modified nucleotide with phosphorothioate linkage
  modified_base 7: mod_base = OTHER; note = 2'-O-methoxyethyl modified 5-methyl cytosine with phosphorothioate linkage
  modified_base 8: mod_base = OTHER; note = 2'-O-methoxyethyl modified thymine with phosphorothioate linkage
  modified_base 9: mod_base = OTHER; note = 2'-O-methoxyethyl modified thymine with phosphorothioate linkage
  modified_base 10: mod_base = OTHER; note = 2'-O-methoxyethyl modified thymine with phosphorothioate linkage
  modified_base 11: mod_base = OTHER; note = 2'-O-methoxyethyl modified 5-methyl cytosine with phosphorothioate linkage
  modified_base 12: mod_base = OTHER; note = 2'-O-methoxyethyl modified nucleotide with phosphorothioate linkage
  modified_base 13: mod_base = OTHER; note = 2'-O-methoxyethyl modified thymine with phosphorothioate linkage
  modified_base 14: mod_base = OTHER; note = 2'-O-methoxyethyl modified nucleotide with phosphorothioate linkage
  modified_base 15: mod_base = OTHER; note = 2'-O-methoxyethyl modified nucleotide with phosphorothioate linkage
  modified_base 16: mod_base = OTHER; note = 2'-O-methoxyethyl modified thymine with phosphorothioate linkage
  modified_base 17: mod_base = OTHER; note = 2'-O-methoxyethyl modified nucleotide with phosphorothioate linkage
  modified_base 18: mod_base = OTHER; note = 2'-O-methoxyethyl modified 5-methyl cytosine with phosphorothioate linkage
  modified_base 19: mod_base = OTHER; note = 2'-O-methoxyethyl modified thymine with phosphorothioate linkage
  modified_base 20: mod_base = OTHER; note = 2'-O-methoxyethyl modified nucleotide
gattcactttcataatgctg

SEQ ID NO: 50 - RNA, 19 nt, synthetic construct
  misc_feature 1..19: note = Synthetic oligonucleotide
  source 1..19: mol_type = other RNA
  modified_base 1: mod_base = OTHER; note = 2'-O-methoxyethyl modified nucleotide with phosphorothioate linkage
  modified_base 2: mod_base = OTHER; note = 2'-O-methoxyethyl modified nucleotide with phosphorothioate linkage
  modified_base 3: mod_base = OTHER; note = 2'-O-methoxyethyl modified thymine with phosphorothioate linkage
  modified_base 4: mod_base = OTHER; note = 2'-O-methoxyethyl modified thymine with phosphorothioate linkage
  modified_base 5: mod_base = OTHER; note = 2'-O-methoxyethyl modified 5-methyl cytosine with phosphorothioate linkage
  modified_base 6: mod_base = OTHER; note = 2'-O-methoxyethyl modified nucleotide with phosphorothioate linkage
  modified_base 7: mod_base = OTHER; note = 2'-O-methoxyethyl modified 5-methyl cytosine with phosphorothioate linkage
  modified_base 8: mod_base = OTHER; note = 2'-O-methoxyethyl modified thymine with phosphorothioate linkage
  modified_base 9: mod_base = OTHER; note = 2'-O-methoxyethyl modified thymine with phosphorothioate linkage
  modified_base 10: mod_base = OTHER; note = 2'-O-methoxyethyl modified thymine with phosphorothioate linkage
  modified_base 11: mod_base = OTHER; note = 2'-O-methoxyethyl modified 5-methyl cytosine with phosphorothioate linkage
  modified_base 12: mod_base = OTHER; note = 2'-O-methoxyethyl modified nucleotide with phosphorothioate linkage
  modified_base 13: mod_base = OTHER; note = 2'-O-methoxyethyl modified thymine with phosphorothioate linkage
  modified_base 14: mod_base = OTHER; note = 2'-O-methoxyethyl modified nucleotide with phosphorothioate linkage
  modified_base 15: mod_base = OTHER; note = 2'-O-methoxyethyl modified nucleotide with phosphorothioate linkage
  modified_base 16: mod_base = OTHER; note = 2'-O-methoxyethyl modified thymine with phosphorothioate linkage
  modified_base 17: mod_base = OTHER; note = 2'-O-methoxyethyl modified nucleotide with phosphorothioate linkage
  modified_base 18: mod_base = OTHER; note = 2'-O-methoxyethyl modified 5-methyl cytosine with phosphorothioate linkage
  modified_base 19: mod_base = OTHER; note = 2'-O-methoxyethyl modified thymine
gattcactttcataatgct

SEQ ID NO: 51 - RNA, 20 nt, synthetic construct
  source 1..20: mol_type = other RNA
  modified_base 1: mod_base = OTHER; note = 2'-O-methoxyethyl modified thymine
  modified_base 2: mod_base = OTHER; note = 2'-O-N-methyl acetamide modified thymine with phosphorothioate linkage
  modified_base 3: mod_base = OTHER; note = 2'-O-N-methyl acetamide modified 5-methyl cytosine with phosphorothioate linkage
  modified_base 4: mod_base = OTHER; note = 2'-O-N-methyl acetamide modified nucleotide with phosphorothioate linkage
  modified_base 5: mod_base = OTHER; note = 2'-O-N-methyl acetamide modified 5-methyl cytosine with phosphorothioate linkage
  modified_base 6: mod_base = OTHER; note = 2'-O-N-methyl acetamide modified thymine with phosphorothioate linkage
  modified_base 7: mod_base = OTHER; note = 2'-O-N-methyl acetamide modified thymine with phosphorothioate linkage
  modified_base 8: mod_base = OTHER; note = 2'-O-N-methyl acetamide modified thymine with phosphorothioate linkage
  modified_base 9: mod_base = OTHER; note = 2'-O-N-methyl acetamide modified 5-methyl cytosine with phosphorothioate linkage
  modified_base 10: mod_base = OTHER; note = 2'-O-N-methyl acetamide modified nucleotide with phosphorothioate linkage
  modified_base 11: mod_base = OTHER; note = 2'-O-N-methyl acetamide modified thymine with phosphorothioate linkage
  modified_base 12: mod_base = OTHER; note = 2'-O-N-methyl acetamide modified nucleotide with phosphorothioate linkage
  modified_base 13: mod_base = OTHER; note = 2'-O-N-methyl acetamide modified nucleotide with phosphorothioate linkage
  modified_base 14: mod_base = OTHER; note = 2'-O-N-methyl acetamide modified thymine with phosphorothioate linkage
  modified_base 15: mod_base = OTHER; note = 2'-O-N-methyl acetamide modified nucleotide with phosphorothioate linkage
  modified_base 16: mod_base = OTHER; note = 2'-O-N-methyl acetamide modified 5-methyl cytosine with phosphorothioate linkage
  modified_base 17: mod_base = OTHER; note = 2'-O-N-methyl acetamide modified thymine with phosphorothioate linkage
  modified_base 18: mod_base = OTHER; note = 2'-O-N-methyl acetamide modified nucleotide with phosphorothioate linkage
  modified_base 19: mod_base = OTHER; note = 2'-O-N-methyl acetamide modified nucleotide
  modified_base 20: mod_base = OTHER; note = 2'-O-methoxyethyl modified 5-methyl cytosine
ttcactttcataatgctggc

SEQ ID NO: 52 - RNA, 18 nt, synthetic construct
  source 1..18: mol_type = other RNA
  modified_base 1: mod_base = OTHER; note = 2'-O-N-methyl acetamide modified 5-methyl cytosine with phosphorothioate linkage
  modified_base 2: mod_base = OTHER; note = 2'-O-N-methyl acetamide modified nucleotide
  modified_base 3: mod_base = OTHER; note = 2'-O-N-methyl acetamide modified 5-methyl cytosine with phosphorothioate linkage
  modified_base 4: mod_base = OTHER; note = 2'-O-N-methyl acetamide modified thymine
  modified_base 5: mod_base = OTHER; note = 2'-O-N-methyl acetamide modified thymine with phosphorothioate linkage
  modified_base 6: mod_base = OTHER; note = 2'-O-N-methyl acetamide modified thymine with phosphorothioate linkage
  modified_base 7: mod_base = OTHER; note = 2'-O-N-methyl acetamide modified 5-methyl cytosine with phosphorothioate linkage
  modified_base 8: mod_base = OTHER; note = 2'-O-N-methyl acetamide modified nucleotide with phosphorothioate linkage
  modified_base 9: mod_base = OTHER; note = 2'-O-N-methyl acetamide modified thymine with phosphorothioate linkage
  modified_base 10: mod_base = OTHER; note = 2'-O-N-methyl acetamide modified nucleotide with phosphorothioate linkage
  modified_base 11: mod_base = OTHER; note = 2'-O-N-methyl acetamide modified nucleotide with phosphorothioate linkage
  modified_base 12: mod_base = OTHER; note = 2'-O-N-methyl acetamide modified thymine with phosphorothioate linkage
  modified_base 13: mod_base = OTHER; note = 2'-O-N-methyl acetamide modified nucleotide with phosphorothioate linkage
  modified_base 14: mod_base = OTHER; note = 2'-O-N-methyl acetamide modified 5-methyl cytosine with phosphorothioate linkage
  modified_base 15: mod_base = OTHER; note = 2'-O-N-methyl acetamide modified thymine with phosphorothioate linkage
  modified_base 16: mod_base = OTHER; note = 2'-O-N-methyl acetamide modified nucleotide with phosphorothioate linkage
  modified_base 17: mod_base = OTHER; note = 2'-O-N-methyl acetamide modified nucleotide with phosphorothioate linkage
  modified_base 18: mod_base = OTHER; note = 2'-O-N-methyl acetamide modified 5-methyl cytosine
cactttcataatgctggc

SEQ ID NO: 53 - RNA, 18 nt, synthetic construct
  source 1..18: mol_type = other RNA
  modified_base 1: mod_base = OTHER; note = 2'-O-methoxyethyl modified 5-methyl cytosine with phosphorothioate linkage
  modified_base 2: mod_base = OTHER; note = 2'-O-methoxyethyl modified nucleotide with phosphorothioate linkage
  modified_base 3: mod_base = OTHER; note = 2'-O-methoxyethyl modified 5-methyl cytosine with phosphorothioate linkage
  modified_base 4: mod_base = OTHER; note = 2'-O-methoxyethyl modified thymine with phosphorothioate linkage
  modified_base 5: mod_base = OTHER; note = 2'-O-methoxyethyl modified thymine with phosphorothioate linkage
  modified_base 6: mod_base = OTHER; note = 2'-O-methoxyethyl modified thymine with phosphorothioate linkage
  modified_base 7: mod_base = OTHER; note = 2'-O-methoxyethyl modified 5-methyl cytosine with phosphorothioate linkage
  modified_base 8: mod_base = OTHER; note = 2'-O-methoxyethyl modified nucleotide with phosphorothioate linkage
  modified_base 9: mod_base = OTHER; note = 2'-O-methoxyethyl modified thymine with phosphorothioate linkage
  modified_base 10: mod_base = OTHER; note = 2'-O-methoxyethyl modified nucleotide with phosphorothioate linkage
  modified_base 11: mod_base = OTHER; note = 2'-O-methoxyethyl modified nucleotide with phosphorothioate linkage
  modified_base 12: mod_base = OTHER; note = 2'-O-methoxyethyl modified thymine with phosphorothioate linkage
  modified_base 13: mod_base = OTHER; note = 2'-O-methoxyethyl modified nucleotide with phosphorothioate linkage
  modified_base 14: mod_base = OTHER; note = 2'-O-methoxyethyl modified 5-methyl cytosine with phosphorothioate linkage
  modified_base 15: mod_base = OTHER; note = 2'-O-methoxyethyl modified thymine with phosphorothioate linkage
  modified_base 16: mod_base = OTHER; note = 2'-O-methoxyethyl modified nucleotide with phosphorothioate linkage
  modified_base 17: mod_base = OTHER; note = 2'-O-methoxyethyl modified nucleotide with phosphorothioate linkage
  modified_base 18: mod_base = OTHER; note = 2'-O-methoxyethyl modified 5-methyl cytosine
cactttcataatgctggc

SEQ ID NO: 54 - RNA, 18 nt, synthetic construct
  source 1..18: mol_type = other RNA
  modified_base 1: mod_base = OTHER; note = 2'-O-N-methyl acetamide modified thymine with phosphorothioate linkage
  modified_base 2: mod_base = OTHER; note = 2'-O-N-methyl acetamide modified 5-methyl cytosine with phosphorothioate linkage
  modified_base 3: mod_base = OTHER; note = 2'-O-N-methyl acetamide modified nucleotide with phosphorothioate linkage
  modified_base 4: mod_base = OTHER; note = 2'-O-N-methyl acetamide modified 5-methyl cytosine with phosphorothioate linkage
  modified_base 5: mod_base = OTHER; note = 2'-O-N-methyl acetamide modified thymine with phosphorothioate linkage
  modified_base 6: mod_base = OTHER; note = 2'-O-N-methyl acetamide modified thymine with phosphorothioate linkage
  modified_base 7: mod_base = OTHER; note = 2'-O-N-methyl acetamide modified thymine with phosphorothioate linkage
  modified_base 8: mod_base = OTHER; note = 2'-O-N-methyl acetamide modified 5-methyl cytosine with phosphorothioate linkage
  modified_base 9: mod_base = OTHER; note = 2'-O-N-methyl acetamide modified nucleotide with phosphorothioate linkage
  modified_base 10: mod_base = OTHER; note = 2'-O-N-methyl acetamide modified thymine with phosphorothioate linkage
  modified_base 11: mod_base = OTHER; note = 2'-O-N-methyl acetamide modified nucleotide with phosphorothioate linkage
  modified_base 12: mod_base = OTHER; note = 2'-O-N-methyl acetamide modified nucleotide with phosphorothioate linkage
  modified_base 13: mod_base = OTHER; note = 2'-O-N-methyl acetamide modified thymine with phosphorothioate linkage
  modified_base 14: mod_base = OTHER; note = 2'-O-N-methyl acetamide modified nucleotide with phosphorothioate linkage
  modified_base 15: mod_base = OTHER; note = 2'-O-N-methyl acetamide modified 5-methyl cytosine with phosphorothioate linkage
  modified_base 16: mod_base = OTHER; note = 2'-O-N-methyl acetamide modified thymine with phosphorothioate linkage
  modified_base 17: mod_base = OTHER; note = 2'-O-N-methyl acetamide modified nucleotide with phosphorothioate linkage
  modified_base 18: mod_base = OTHER; note = 2'-O-N-methyl acetamide modified nucleotide
tcactttcataatgctgg

SEQ ID NO: 55 - RNA, 18 nt, synthetic construct
  source 1..18: mol_type = other RNA
  modified_base 1: mod_base = OTHER; note = 2'-O-N-methyl acetamide modified 5-methyl cytosine with phosphorothioate linkage
  modified_base 2: mod_base = OTHER; note = 2'-O-N-methyl acetamide modified nucleotide with phosphorothioate linkage
  modified_base 3: mod_base = OTHER; note = 2'-O-N-methyl acetamide modified 5-methyl cytosine with phosphorothioate linkage
  modified_base 4: mod_base = OTHER; note = 2'-O-N-methyl acetamide modified thymine with phosphorothioate linkage
  modified_base 5: mod_base = OTHER; note = 2'-O-N-methyl acetamide modified thymine with phosphorothioate linkage
  modified_base 6: mod_base = OTHER; note = 2'-O-N-methyl acetamide modified thymine with phosphorothioate linkage
  modified_base 7: mod_base = OTHER; note = 2'-O-N-methyl acetamide modified 5-methyl cytosine with phosphorothioate linkage
  modified_base 8: mod_base = OTHER; note = 2'-O-N-methyl acetamide modified nucleotide with phosphorothioate linkage
  modified_base 9: mod_base = OTHER; note = 2'-O-N-methyl acetamide modified thymine with phosphorothioate linkage
  modified_base 10: mod_base = OTHER; note = 2'-O-N-methyl acetamide modified nucleotide with phosphorothioate linkage
  modified_base 11: mod_base = OTHER; note = 2'-O-N-methyl acetamide modified nucleotide with phosphorothioate linkage
  modified_base 12: mod_base = OTHER; note = 2'-O-N-methyl acetamide modified thymine with phosphorothioate linkage
  modified_base 13: mod_base = OTHER; note = 2'-O-N-methyl acetamide modified nucleotide with phosphorothioate linkage
  modified_base 14: mod_base = OTHER; note = 2'-O-N-methyl acetamide modified 5-methyl cytosine with phosphorothioate linkage
  modified_base 15: mod_base = OTHER; note = 2'-O-N-methyl acetamide modified thymine with phosphorothioate linkage
  modified_base 16: mod_base = OTHER; note = 2'-O-N-methyl acetamide modified nucleotide with phosphorothioate linkage
  modified_base 17: mod_base = OTHER; note = 2'-O-N-methyl acetamide modified nucleotide with phosphorothioate linkage
  modified_base 18: mod_base = OTHER; note = 2'-O-N-methyl acetamide modified 5-methyl cytosine
cactttcataatgctggc

SEQ ID NO: 56 - RNA, 16 nt, synthetic construct
  source 1..16: mol_type = other RNA
  modified_base 1: mod_base = OTHER; note = 2'-O-methoxyethyl modified 5-methyl cytosine with phosphorothioate linkage
  modified_base 2: mod_base = OTHER; note = 2'-O-methoxyethyl modified thymine with phosphorothioate linkage
  modified_base 3: mod_base = OTHER; note = 2'-O-methoxyethyl modified thymine with phosphorothioate linkage
  modified_base 4: mod_base = OTHER; note = 2'-O-methoxyethyl modified thymine with phosphorothioate linkage
  modified_base 5: mod_base = OTHER; note = 2'-O-methoxyethyl modified 5-methyl cytosine with phosphorothioate linkage
  modified_base 6: mod_base = OTHER; note = 2'-O-methoxyethyl modified nucleotide with phosphorothioate linkage
  modified_base 7: mod_base = OTHER; note = 2'-O-methoxyethyl modified thymine with phosphorothioate linkage
  modified_base 8: mod_base = OTHER; note = 2'-O-methoxyethyl modified nucleotide with phosphorothioate linkage
  modified_base 9: mod_base = OTHER; note = 2'-O-methoxyethyl modified nucleotide with phosphorothioate linkage
  modified_base 10: mod_base = OTHER; note = 2'-O-methoxyethyl modified thymine
  modified_base 11: mod_base = OTHER; note = 2'-O-methoxyethyl modified nucleotide
  modified_base 12: mod_base = OTHER; note = 2'-O-methoxyethyl modified 5-methyl cytosine
  modified_base 13: mod_base = OTHER; note = 2'-O-methoxyethyl modified thymine
  modified_base 14: mod_base = OTHER; note = 2'-O-methoxyethyl modified nucleotide with phosphorothioate linkage
  modified_base 15: mod_base = OTHER; note = 2'-O-methoxyethyl modified nucleotide with phosphorothioate linkage
  modified_base 16: mod_base = OTHER; note = 2'-O-methoxyethyl modified 5-methyl cytosine
ctttcataatgctggc

SEQ ID NO: 57 - RNA, 16 nt, synthetic construct
  source 1..16: mol_type = other RNA
  modified_base 1: mod_base = OTHER; note = 2'-O-methoxyethyl modified 5-methyl cytosine with phosphorothioate linkage
  modified_base 2: mod_base = OTHER; note = 2'-O-methoxyethyl modified thymine with phosphorothioate linkage
  modified_base 3: mod_base = OTHER; note = 2'-O-methoxyethyl modified thymine with phosphorothioate linkage
  modified_base 4: mod_base = OTHER; note = 2'-O-methoxyethyl modified thymine with phosphorothioate linkage
  modified_base 5: mod_base = OTHER; note = 2'-O-methoxyethyl modified 5-methyl cytosine with phosphorothioate linkage
  modified_base 6: mod_base = OTHER; note = 2'-O-methoxyethyl modified nucleotide with phosphorothioate linkage
  modified_base 7: mod_base = OTHER; note = 2'-O-methoxyethyl modified thymine with phosphorothioate linkage
  modified_base 8: mod_base = OTHER; note = 2'-O-methoxyethyl modified nucleotide with phosphorothioate linkage
  modified_base 9: mod_base = OTHER; note = 2'-O-methoxyethyl modified nucleotide
  modified_base 10: mod_base = OTHER; note = 2'-O-methoxyethyl modified thymine
  modified_base 11: mod_base = OTHER; note = 2'-O-methoxyethyl modified nucleotide
  modified_base 12: mod_base = OTHER; note = 2'-O-methoxyethyl modified 5-methyl cytosine
  modified_base 13: mod_base = OTHER; note = 2'-O-methoxyethyl modified thymine with phosphorothioate linkage
  modified_base 14: mod_base = OTHER; note = 2'-O-methoxyethyl modified nucleotide with phosphorothioate linkage
  modified_base 15: mod_base = OTHER; note = 2'-O-methoxyethyl modified nucleotide with phosphorothioate linkage
  modified_base 16: mod_base = OTHER; note = 2'-O-methoxyethyl modified 5-methyl cytosine
ctttcataatgctggc

SEQ ID NO: 58 - RNA, 16 nt, synthetic construct
  source 1..16: mol_type = other RNA
  modified_base 1: mod_base = OTHER; note = 2'-O-methoxyethyl modified 5-methyl cytosine with phosphorothioate linkage
  modified_base 2: mod_base = OTHER; note = 2'-O-methoxyethyl modified thymine with phosphorothioate linkage
  modified_base 3: mod_base = OTHER; note = 2'-O-methoxyethyl modified thymine with phosphorothioate linkage
  modified_base 4: mod_base = OTHER; note = 2'-O-methoxyethyl modified thymine with phosphorothioate linkage
  modified_base 5: mod_base = OTHER; note = 2'-O-methoxyethyl modified 5-methyl cytosine with phosphorothioate linkage
  modified_base 6: mod_base = OTHER; note = 2'-O-methoxyethyl modified nucleotide with phosphorothioate linkage
  modified_base 7: mod_base = OTHER; note = 2'-O-methoxyethyl modified thymine
  modified_base 8: mod_base = OTHER; note = 2'-O-methoxyethyl modified nucleotide
  modified_base 9: mod_base = OTHER; note = 2'-O-methoxyethyl modified nucleotide
  modified_base 10: mod_base = OTHER; note = 2'-O-methoxyethyl modified thymine with phosphorothioate linkage
  modified_base 11: mod_base = OTHER; note = 2'-O-methoxyethyl modified nucleotide with phosphorothioate linkage
  modified_base 12: mod_base = OTHER; note = 2'-O-methoxyethyl modified 5-methyl cytosine with phosphorothioate linkage
  modified_base 13: mod_base = OTHER; note = 2'-O-methoxyethyl modified thymine with phosphorothioate linkage
  modified_base 14: mod_base = OTHER; note = 2'-O-methoxyethyl modified nucleotide with phosphorothioate linkage
  modified_base 15: mod_base = OTHER; note = 2'-O-methoxyethyl modified nucleotide with phosphorothioate linkage
  modified_base 16: mod_base = OTHER; note = 2'-O-methoxyethyl modified 5-methyl cytosine
ctttcataatgctggc

SEQ ID NO: 59 - RNA, 16 nt, synthetic construct
  source 1..16: mol_type = other RNA
  modified_base 1: mod_base = OTHER; note = 2'-O-methoxyethyl modified 5-methyl cytosine with phosphorothioate linkage
  modified_base 2: mod_base = OTHER; note = 2'-O-methoxyethyl modified thymine with phosphorothioate linkage
  modified_base 3: mod_base = OTHER; note = 2'-O-methoxyethyl modified thymine with phosphorothioate linkage
  modified_base 4: mod_base = OTHER; note = 2'-O-methoxyethyl modified thymine with phosphorothioate linkage
  modified_base 5: mod_base = OTHER; note = 2'-O-methoxyethyl modified 5-methyl cytosine with phosphorothioate linkage
  modified_base 6: mod_base = OTHER; note = 2'-O-methoxyethyl modified nucleotide with phosphorothioate linkage
  modified_base 7: mod_base = OTHER; note = 2'-O-methoxyethyl modified thymine
  modified_base 8: mod_base = OTHER; note = 2'-O-methoxyethyl modified nucleotide
  modified_base 9: mod_base = OTHER; note = 2'-O-methoxyethyl modified nucleotide
  modified_base 10: mod_base = OTHER; note = 2'-O-methoxyethyl modified thymine
  modified_base 11: mod_base = OTHER; note = 2'-O-methoxyethyl modified nucleotide with phosphorothioate linkage
  modified_base 12: mod_base = OTHER; note = 2'-O-methoxyethyl modified 5-methyl cytosine with phosphorothioate linkage
  modified_base 13: mod_base = OTHER; note = 2'-O-methoxyethyl modified thymine with phosphorothioate linkage
  modified_base 14: mod_base = OTHER; note = 2'-O-methoxyethyl modified nucleotide with phosphorothioate linkage
  modified_base 15: mod_base = OTHER; note = 2'-O-methoxyethyl modified nucleotide with phosphorothioate linkage
  modified_base 16: mod_base = OTHER; note = 2'-O-methoxyethyl modified 5-methyl cytosine
ctttcataatgctggc

SEQ ID NO: 60 - RNA, 16 nt, synthetic construct
  source 1..16: mol_type = other RNA
  modified_base 1: mod_base = OTHER; note = 2'-O-methoxyethyl modified 5-methyl cytosine with phosphorothioate linkage
  modified_base 2: mod_base = OTHER; note = 2'-O-methoxyethyl modified thymine with phosphorothioate linkage
  modified_base 3: mod_base = OTHER; note = 2'-O-methoxyethyl modified thymine with phosphorothioate linkage
  modified_base 4: mod_base = OTHER; note = 2'-O-methoxyethyl modified thymine with phosphorothioate linkage
  modified_base 5: mod_base = OTHER; note = 2'-O-methoxyethyl modified 5-methyl cytosine with phosphorothioate linkage
  modified_base 6: mod_base = OTHER; note = 2'-O-methoxyethyl modified nucleotide
  modified_base 7: mod_base = OTHER; note = 2'-O-methoxyethyl modified thymine
  modified_base 8: mod_base = OTHER; note = 2'-O-methoxyethyl modified nucleotide
  modified_base 9: mod_base = OTHER; note = 2'-O-methoxyethyl modified nucleotide
  modified_base 10: mod_base = OTHER; note = 2'-O-methoxyethyl modified thymine
  modified_base 11: mod_base = OTHER; note = 2'-O-methoxyethyl modified nucleotide with phosphorothioate linkage
  modified_base 12: mod_base = OTHER; note = 2'-O-methoxyethyl modified 5-methyl cytosine with phosphorothioate linkage
  modified_base 13: mod_base = OTHER; note = 2'-O-methoxyethyl modified thymine with phosphorothioate linkage
  modified_base 14: mod_base = OTHER; note = 2'-O-methoxyethyl modified nucleotide with phosphorothioate linkage
  modified_base 15: mod_base = OTHER; note = 2'-O-methoxyethyl modified nucleotide with phosphorothioate linkage
  modified_base 16: mod_base = OTHER; note = 2'-O-methoxyethyl modified 5-methyl cytosine
ctttcataatgctggc

SEQ ID NO: 61 - RNA, 16 nt, synthetic construct
  source 1..16: mol_type = other RNA
  modified_base 1: mod_base = OTHER; note = 2'-O-methoxyethyl modified 5-methyl cytosine with phosphorothioate linkage
  modified_base 2: mod_base = OTHER; note = 2'-O-methoxyethyl modified thymine with phosphorothioate linkage
  modified_base 3: mod_base = OTHER; note = 2'-O-methoxyethyl modified thymine with phosphorothioate linkage
  modified_base 4: mod_base = OTHER; note = 2'-O-methoxyethyl modified thymine with phosphorothioate linkage
  modified_base 5: mod_base = OTHER; note = 2'-O-methoxyethyl modified 5-methyl cytosine with phosphorothioate linkage
  modified_base 6: mod_base = OTHER; note = 2'-O-methoxyethyl modified nucleotide
  modified_base 7: mod_base = OTHER; note = 2'-O-methoxyethyl modified thymine
  modified_base 8: mod_base = OTHER; note = 2'-O-methoxyethyl modified nucleotide
  modified_base 9: mod_base = OTHER; note = 2'-O-methoxyethyl modified nucleotide
  modified_base 10: mod_base = OTHER; note = 2'-O-methoxyethyl modified thymine
  modified_base 11: mod_base = OTHER; note = 2'-O-methoxyethyl modified nucleotide
  modified_base 12: mod_base = OTHER; note = 2'-O-methoxyethyl modified 5-methyl cytosine with phosphorothioate linkage
  modified_base 13: mod_base = OTHER; note = 2'-O-methoxyethyl modified thymine with phosphorothioate linkage
  modified_base 14: mod_base = OTHER; note = 2'-O-methoxyethyl modified nucleotide with phosphorothioate linkage
  modified_base 15: mod_base = OTHER; note = 2'-O-methoxyethyl modified nucleotide with phosphorothioate linkage
  modified_base 16: mod_base = OTHER; note = 2'-O-methoxyethyl modified 5-methyl cytosine
ctttcataatgctggc

SEQ ID NO: 62 - RNA, 16 nt, synthetic construct
  source 1..16: mol_type = other RNA
  modified_base 1: mod_base = OTHER; note = 2'-O-methoxyethyl modified 5-methyl cytosine with phosphorothioate linkage
  modified_base 2: mod_base = OTHER; note = 2'-O-methoxyethyl modified thymine with phosphorothioate linkage
  modified_base 3: mod_base = OTHER; note = 2'-O-methoxyethyl modified thymine with phosphorothioate linkage
  modified_base 4: mod_base = OTHER; note = 2'-O-methoxyethyl modified thymine with phosphorothioate linkage
  modified_base 5: mod_base = OTHER; note = 2'-O-methoxyethyl modified 5-methyl cytosine
  modified_base 6: mod_base = OTHER; note = 2'-O-methoxyethyl modified nucleotide
  modified_base 7: mod_base = OTHER; note = 2'-O-methoxyethyl modified thymine
  modified_base 8: mod_base = OTHER; note = 2'-O-methoxyethyl modified nucleotide
  modified_base 9: mod_base = OTHER; note = 2'-O-methoxyethyl modified nucleotide with phosphorothioate linkage
  modified_base 10: mod_base = OTHER; note = 2'-O-methoxyethyl modified thymine with phosphorothioate linkage
  modified_base 11: mod_base = OTHER; note = 2'-O-methoxyethyl modified nucleotide with phosphorothioate linkage
  modified_base 12: mod_base = OTHER; note = 2'-O-methoxyethyl modified 5-methyl cytosine with phosphorothioate linkage
  modified_base 13: mod_base = OTHER; note = 2'-O-methoxyethyl modified thymine with phosphorothioate linkage
  modified_base 14: mod_base = OTHER; note = 2'-O-methoxyethyl modified nucleotide with phosphorothioate linkage
  modified_base 15: mod_base = OTHER; note = 2'-O-methoxyethyl modified nucleotide with phosphorothioate linkage
  modified_base 16: mod_base = OTHER; note = 2'-O-methoxyethyl modified 5-methyl cytosine
ctttcataatgctggc

SEQ ID NO: 63 - RNA, 16 nt, synthetic construct
  source 1..16: mol_type = other RNA
  modified_base 1: mod_base = OTHER; note = 2'-O-methoxyethyl modified 5-methyl cytosine with phosphorothioate linkage
  modified_base 2: mod_base = OTHER; note = 2'-O-methoxyethyl modified thymine with phosphorothioate linkage
  modified_base 3: mod_base = OTHER; note = 2'-O-methoxyethyl modified thymine with phosphorothioate linkage
  modified_base 4: mod_base = OTHER; note = 2'-O-methoxyethyl modified thymine with phosphorothioate linkage
  modified_base 5: mod_base = OTHER; note = 2'-O-methoxyethyl modified 5-methyl cytosine
  modified_base 6: mod_base = OTHER; note = 2'-O-methoxyethyl modified nucleotide
  modified_base 7: mod_base = OTHER; note = 2'-O-methoxyethyl modified thymine
  modified_base 8: mod_base = OTHER; note = 2'-O-methoxyethyl modified nucleotide
  modified_base 9: mod_base = OTHER; note = 2'-O-methoxyethyl modified nucleotide
  modified_base 10: mod_base = OTHER; note = 2'-O-methoxyethyl modified thymine
  modified_base 11: mod_base = OTHER; note = 2'-O-methoxyethyl modified nucleotide
  modified_base 12: mod_base = OTHER; note = 2'-O-methoxyethyl modified 5-methyl cytosine with phosphorothioate linkage
  modified_base 13: mod_base = OTHER; note = 2'-O-methoxyethyl modified thymine with phosphorothioate linkage
  modified_base 14: mod_base = OTHER; note = 2'-O-methoxyethyl modified nucleotide with phosphorothioate linkage
  modified_base 15: mod_base = OTHER; note = 2'-O-methoxyethyl modified nucleotide with phosphorothioate linkage
  modified_base 16: mod_base = OTHER; note = 2'-O-methoxyethyl modified 5-methyl cytosine
ctttcataatgctggc

SEQ ID NO: 64 - RNA, 16 nt, synthetic construct
  source 1..16: mol_type = other RNA
  modified_base 1: mod_base = OTHER; note = 2'-O-methoxyethyl modified 5-methyl cytosine with phosphorothioate linkage
  modified_base 2: mod_base = OTHER; note = 2'-O-methoxyethyl modified thymine with phosphorothioate linkage
  modified_base 3: mod_base = OTHER; note = 2'-O-methoxyethyl modified thymine with phosphorothioate linkage
  modified_base 4: mod_base = OTHER; note = 2'-O-methoxyethyl modified thymine
  modified_base 5: mod_base = OTHER; note = 2'-O-methoxyethyl modified 5-methyl cytosine with phosphorothioate linkage
  modified_base 6: mod_base = OTHER; note = 2'-O-methoxyethyl modified nucleotide with phosphorothioate linkage
  modified_base 7: mod_base = OTHER; note = 2'-O-methoxyethyl modified thymine with phosphorothioate linkage
  modified_base 8: mod_base = OTHER; note = 2'-O-methoxyethyl modified nucleotide
  modified_base 9: mod_base = OTHER; note = 2'-O-methoxyethyl modified nucleotide with phosphorothioate linkage
  modified_base 10: mod_base = OTHER; note = 2'-O-methoxyethyl modified thymine with phosphorothioate linkage
  modified_base 11: mod_base = OTHER; note = 2'-O-methoxyethyl modified nucleotide with phosphorothioate linkage
  modified_base 12: mod_base = OTHER; note = 2'-O-methoxyethyl modified 5-methyl cytosine
  modified_base 13: mod_base = OTHER; note = 2'-O-methoxyethyl modified thymine with phosphorothioate linkage
  modified_base 14: mod_base = OTHER; note = 2'-O-methoxyethyl modified nucleotide with phosphorothioate linkage
  modified_base 15: mod_base = OTHER; note = 2'-O-methoxyethyl modified nucleotide with phosphorothioate linkage
  modified_base 16: mod_base = OTHER; note = 2'-O-methoxyethyl modified 5-methyl cytosine
ctttcataatgctggc

SEQ ID NO: 65 - RNA, 16 nt, synthetic construct
  source 1..16: mol_type = other RNA
  modified_base 1: mod_base = OTHER; note = 2'-O-methoxyethyl modified 5-methyl cytosine with phosphorothioate linkage
  modified_base 2: mod_base = OTHER; note = 2'-O-methoxyethyl modified thymine with phosphorothioate linkage
  modified_base 3: mod_base = OTHER; note = 2'-O-methoxyethyl modified thymine
  modified_base 4: mod_base = OTHER; note = 2'-O-methoxyethyl modified thymine with phosphorothioate linkage
  modified_base 5: mod_base = OTHER; note = 2'-O-methoxyethyl modified 5-methyl cytosine with phosphorothioate linkage
  modified_base 6: mod_base = OTHER; note = 2'-O-methoxyethyl modified nucleotide with phosphorothioate linkage
  modified_base 7: mod_base = OTHER; note = 2'-O-methoxyethyl modified thymine with phosphorothioate linkage
  modified_base 8: mod_base = OTHER; note = 2'-O-methoxyethyl modified nucleotide with phosphorothioate linkage
  modified_base 9: mod_base = OTHER; note = 2'-O-methoxyethyl modified nucleotide with phosphorothioate linkage
  modified_base 10: mod_base = OTHER; note = 2'-O-methoxyethyl modified thymine with phosphorothioate linkage
  modified_base 11: mod_base = OTHER; note = 2'-O-methoxyethyl modified nucleotide with phosphorothioate linkage
  modified_base 12: mod_base = OTHER; note = 2'-O-methoxyethyl modified 5-methyl cytosine with phosphorothioate linkage
  modified_base 13: mod_base = OTHER; note = 2'-O-methoxyethyl modified thymine
  modified_base 14: mod_base = OTHER; note = 2'-O-methoxyethyl modified nucleotide with phosphorothioate linkage
  modified_base 15: mod_base = OTHER; note = 2'-O-methoxyethyl modified nucleotide with phosphorothioate linkage
  modified_base 16: mod_base = OTHER; note = 2'-O-methoxyethyl modified 5-methyl cytosine
ctttcataatgctggc

SEQ ID NO: 66 - RNA, 16 nt, synthetic construct
  source 1..16: mol_type = other RNA
  modified_base 1: mod_base = OTHER; note = 2'-O-methoxyethyl modified 5-methyl cytosine with phosphorothioate linkage
  modified_base 2: mod_base = OTHER; note = 2'-O-methoxyethyl modified thymine with phosphorothioate linkage
  modified_base 3: mod_base = OTHER; note = 2'-O-methoxyethyl modified thymine
  modified_base 4: mod_base = OTHER; note = 2'-O-methoxyethyl modified thymine with phosphorothioate linkage
  modified_base 5: mod_base = OTHER; note = 2'-O-methoxyethyl modified 5-methyl cytosine with phosphorothioate linkage
  modified_base 6: mod_base = OTHER; note = 2'-O-methoxyethyl modified nucleotide
  modified_base 7: mod_base = OTHER; note = 2'-O-methoxyethyl modified thymine with phosphorothioate linkage
  modified_base 8: mod_base = OTHER; note = 2'-O-methoxyethyl modified nucleotide with phosphorothioate linkage
  modified_base 9: mod_base = OTHER; note = 2'-O-methoxyethyl modified nucleotide
  modified_base 10: mod_base = OTHER; note = 2'-O-methoxyethyl modified thymine with phosphorothioate linkage
  modified_base 11: mod_base = OTHER; note = 2'-O-methoxyethyl modified nucleotide with phosphorothioate linkage
  modified_base 12: mod_base = OTHER; note = 2'-O-methoxyethyl modified 5-methyl cytosine
  modified_base 13: mod_base = OTHER; note = 2'-O-methoxyethyl modified thymine with phosphorothioate linkage
  modified_base 14: mod_base = OTHER; note = 2'-O-methoxyethyl modified nucleotide with phosphorothioate linkage
  modified_base 15: mod_base = OTHER; note = 2'-O-methoxyethyl modified nucleotide with phosphorothioate linkage
  modified_base 16: mod_base = OTHER; note = 2'-O-methoxyethyl modified 5-methyl cytosine
ctttcataatgctggc

SEQ ID NO: 67 - RNA, 16 nt, synthetic construct
  source 1..16: mol_type = other RNA
  modified_base 1: mod_base = OTHER; note = 2'-O-methoxyethyl modified 5-methyl cytosine with phosphorothioate linkage
  modified_base 2: mod_base = OTHER; note = 2'-O-methoxyethyl modified thymine with phosphorothioate linkage
  modified_base 3: mod_base = OTHER; note = 2'-O-methoxyethyl modified thymine
  modified_base 4: mod_base = OTHER; note = 2'-O-methoxyethyl modified thymine with phosphorothioate linkage
  modified_base 5: mod_base = OTHER; note = 2'-O-methoxyethyl modified 5-methyl cytosine with phosphorothioate linkage
  modified_base 6: mod_base = OTHER; note = 2'-O-methoxyethyl modified nucleotide
  modified_base 7: mod_base = OTHER; note = 2'-O-methoxyethyl modified thymine with phosphorothioate linkage
  modified_base 8: mod_base = OTHER; note = 2'-O-methoxyethyl modified nucleotide with phosphorothioate linkage
  modified_base 9: mod_base = OTHER; note = 2'-O-methoxyethyl modified nucleotide
  modified_base 10: mod_base = OTHER; note = 2'-O-methoxyethyl modified thymine with phosphorothioate linkage
  modified_base 11: mod_base = OTHER; note = 2'-O-methoxyethyl modified nucleotide
  modified_base 12: mod_base = OTHER; note = 2'-O-methoxyethyl modified 5-methyl cytosine with phosphorothioate linkage
  modified_base 13: mod_base = OTHER; note = 2'-O-methoxyethyl modified thymine
  modified_base 14: mod_base = OTHER; note = 2'-O-methoxyethyl modified nucleotide with phosphorothioate linkage
  modified_base 15: mod_base = OTHER; note = 2'-O-methoxyethyl modified nucleotide with phosphorothioate linkage
  modified_base 16: mod_base = OTHER; note = 2'-O-methoxyethyl modified 5-methyl cytosine
ctttcataatgctggc

SEQ ID NO: 68 - RNA, 16 nt, synthetic construct
  source 1..16: mol_type = other RNA
  modified_base 1: mod_base = OTHER; note = 2'-O-methoxyethyl modified 5-methyl cytosine with phosphorothioate linkage
  modified_base 2: mod_base = OTHER; note = 2'-O-methoxyethyl modified thymine with phosphorothioate linkage
  modified_base 3: mod_base = OTHER; note = 2'-O-methoxyethyl modified thymine
  modified_base 4: mod_base = OTHER; note = 2'-O-methoxyethyl modified thymine with phosphorothioate linkage
  modified_base 5: mod_base = OTHER; note = 2'-O-methoxyethyl modified 5-methyl cytosine
  modified_base 6: mod_base = OTHER; note = 2'-O-methoxyethyl modified nucleotide with phosphorothioate linkage
  modified_base 7: mod_base = OTHER; note = 2'-O-methoxyethyl modified thymine
  modified_base 8: mod_base = OTHER; note = 2'-O-methoxyethyl modified nucleotide with phosphorothioate linkage
  modified_base 9: mod_base = OTHER; note = 2'-O-methoxyethyl modified nucleotide
  modified_base 10: mod_base = OTHER; note = 2'-O-methoxyethyl modified thymine with phosphorothioate linkage
  modified_base 11: mod_base = OTHER; note = 2'-O-methoxyethyl modified nucleotide
  modified_base 12: mod_base = OTHER; note = 2'-O-methoxyethyl modified 5-methyl cytosine with phosphorothioate linkage
  modified_base 13: mod_base = OTHER; note = 2'-O-methoxyethyl modified thymine
  modified_base 14: mod_base = OTHER; note = 2'-O-methoxyethyl modified nucleotide with phosphorothioate linkage
  modified_base 15: mod_base = OTHER; note = 2'-O-methoxyethyl modified nucleotide with phosphorothioate linkage
  modified_base 16: mod_base = OTHER; note = 2'-O-methoxyethyl modified 5-methyl cytosine
ctttcataatgctggc

SEQ ID NO: 69 - RNA, 16 nt, synthetic construct
  source 1..16: mol_type = other RNA
  modified_base 1: mod_base = OTHER; note = 2'-O-methoxyethyl modified 5-methyl cytosine with phosphorothioate linkage
  modified_base 2: mod_base = OTHER; note = 2'-O-methoxyethyl modified thymine with phosphorothioate linkage
  modified_base 3: mod_base = OTHER; note = 2'-O-methoxyethyl modified thymine
  modified_base 4: mod_base = OTHER; note = 2'-O-methoxyethyl modified thymine
  modified_base 5: mod_base = OTHER; note = 2'-O-methoxyethyl modified 5-methyl cytosine
  modified_base 6: mod_base = OTHER; note = 2'-O-methoxyethyl modified nucleotide
  modified_base 7: mod_base = OTHER; note = 2'-O-methoxyethyl modified thymine with phosphorothioate linkage
  modified_base 8: mod_base = OTHER; note = 2'-O-methoxyethyl modified nucleotide with phosphorothioate linkage
  modified_base 9: mod_base = OTHER; note = 2'-O-methoxyethyl modified nucleotide with phosphorothioate linkage
  modified_base 10: mod_base = OTHER; note = 2'-O-methoxyethyl modified thymine with phosphorothioate linkage
  modified_base 11: mod_base = OTHER; note = 2'-O-methoxyethyl modified nucleotide with phosphorothioate linkage
  modified_base 12: mod_base = OTHER; note = 2'-O-methoxyethyl modified 5-methyl cytosine with phosphorothioate linkage
  modified_base 13: mod_base = OTHER; note = 2'-O-methoxyethyl modified thymine with phosphorothioate linkage
  modified_base 14: mod_base = OTHER; note = 2'-O-methoxyethyl modified nucleotide with phosphorothioate linkage
  modified_base 15: mod_base = OTHER; note = 2'-O-methoxyethyl modified nucleotide with phosphorothioate linkage
  modified_base 16: mod_base = OTHER; note = 2'-O-methoxyethyl modified 5-methyl cytosine
ctttcataatgctggc

SEQ ID NO: 70 - RNA, 16 nt, synthetic construct
  source 1..16: mol_type = other RNA
  modified_base 1: mod_base = OTHER; note = 2'-O-methoxyethyl modified 5-methyl cytosine with phosphorothioate linkage
  modified_base 2: mod_base = OTHER; note = 2'-O-methoxyethyl modified thymine
  modified_base 3: mod_base = OTHER; note = 2'-O-methoxyethyl modified thymine
  modified_base 4: mod_base = OTHER; note = 2'-O-methoxyethyl modified thymine with phosphorothioate linkage
  modified_base 5: mod_base = OTHER; note = 2'-O-methoxyethyl modified 5-methyl cytosine with phosphorothioate linkage
  modified_base 6: mod_base = OTHER; note = 2'-O-methoxyethyl modified nucleotide with phosphorothioate linkage
  modified_base 7: mod_base = OTHER; note = 2'-O-methoxyethyl modified thymine with phosphorothioate linkage
  modified_base 8: mod_base = OTHER; note = 2'-O-methoxyethyl modified nucleotide with phosphorothioate linkage
  modified_base 9: mod_base = OTHER; note = 2'-O-methoxyethyl modified nucleotide with phosphorothioate linkage
  modified_base 10: mod_base = OTHER; note = 2'-O-methoxyethyl modified thymine with phosphorothioate linkage
  modified_base 11: mod_base = OTHER; note = 2'-O-methoxyethyl modified nucleotide with phosphorothioate linkage
  modified_base 12: mod_base = OTHER; note = 2'-O-methoxyethyl modified 5-methyl cytosine
  modified_base 13: mod_base = OTHER; note = 2'-O-methoxyethyl modified thymine
  modified_base 14: mod_base = OTHER; note = 2'-O-methoxyethyl modified nucleotide with phosphorothioate linkage
  modified_base 15: mod_base = OTHER; note = 2'-O-methoxyethyl modified nucleotide with phosphorothioate linkage
  modified_base 16: mod_base = OTHER; note = 2'-O-methoxyethyl modified 5-methyl cytosine
ctttcataatgctggc

SEQ ID NO: 71 - RNA, 16 nt, synthetic construct
  source 1..16: mol_type = other RNA
  modified_base 1: mod_base = OTHER; note = 2'-O-methoxyethyl modified 5-methyl cytosine with phosphorothioate linkage
  modified_base 2: mod_base = OTHER; note = 2'-O-methoxyethyl modified thymine
  modified_base 3: mod_base = OTHER; note = 2'-O-methoxyethyl modified thymine
  modified_base 4: mod_base = OTHER; note = 2'-O-methoxyethyl modified thymine
  modified_base 5: mod_base = OTHER; note = 2'-O-methoxyethyl modified 5-methyl cytosine with phosphorothioate linkage
  modified_base 6: mod_base = OTHER; note = 2'-O-methoxyethyl modified nucleotide with phosphorothioate linkage
  modified_base 7: mod_base = OTHER; note = 2'-O-methoxyethyl modified thymine with phosphorothioate linkage
  modified_base 8: mod_base = OTHER; note = 2'-O-methoxyethyl modified nucleotide with phosphorothioate linkage
  modified_base 9: mod_base = OTHER; note = 2'-O-methoxyethyl modified nucleotide with phosphorothioate linkage
  modified_base 10: mod_base = OTHER; note = 2'-O-methoxyethyl modified thymine with phosphorothioate linkage
  modified_base 11: mod_base = OTHER; note = 2'-O-methoxyethyl modified nucleotide with phosphorothioate linkage
  modified_base 12: mod_base = OTHER; note = 2'-O-methoxyethyl modified 5-methyl cytosine
  modified_base 13: mod_base = OTHER; note = 2'-O-methoxyethyl modified thymine
  modified_base 14: mod_base = OTHER; note = 2'-O-methoxyethyl modified nucleotide with phosphorothioate linkage
  modified_base 15: mod_base = OTHER; note = 2'-O-methoxyethyl modified nucleotide with phosphorothioate linkage
  modified_base 16: mod_base = OTHER; note = 2'-O-methoxyethyl modified 5-methyl cytosine
ctttcataatgctggc

SEQ ID NO: 72 - RNA, 16 nt, synthetic construct
  source 1..16: mol_type = other RNA
  modified_base 1: mod_base = OTHER; note = 2'-O-methoxyethyl modified 5-methyl cytosine with phosphorothioate linkage
  modified_base 2: mod_base = OTHER; note = 2'-O-methoxyethyl modified thymine
  modified_base 3: mod_base = OTHER; note = 2'-O-methoxyethyl modified thymine
  modified_base 4: mod_base = OTHER; note = 2'-O-methoxyethyl modified thymine
  modified_base 5: mod_base = OTHER; note = 2'-O-methoxyethyl modified 5-methyl cytosine with phosphorothioate linkage
  modified_base 6: mod_base = OTHER; note = 2'-O-methoxyethyl modified nucleotide with phosphorothioate linkage
  modified_base 7: mod_base = OTHER; note = 2'-O-methoxyethyl modified thymine with phosphorothioate linkage
  modified_base 8: mod_base = OTHER; note = 2'-O-methoxyethyl modified nucleotide with phosphorothioate linkage
  modified_base 9: mod_base = OTHER; note = 2'-O-methoxyethyl modified nucleotide with phosphorothioate linkage
  modified_base 10: mod_base = OTHER; note = 2'-O-methoxyethyl modified thymine with phosphorothioate linkage
  modified_base 11: mod_base = OTHER; note = 2'-O-methoxyethyl modified nucleotide
  modified_base 12: mod_base = OTHER; note = 2'-O-methoxyethyl modified 5-methyl cytosine
  modified_base 13: mod_base = OTHER; note = 2'-O-methoxyethyl modified thymine
  modified_base 14: mod_base = OTHER; note = 2'-O-methoxyethyl modified nucleotide with phosphorothioate linkage
  modified_base 15: mod_base = OTHER; note = 2'-O-methoxyethyl modified nucleotide with phosphorothioate linkage
  modified_base 16: mod_base = OTHER; note = 2'-O-methoxyethyl modified 5-methyl cytosine
ctttcataatgctggc

SEQ ID NO: 73 - RNA, 16 nt, synthetic construct
  source 1..16: mol_type = other RNA
  modified_base 1: mod_base = OTHER; note = 2'-O-methoxyethyl modified 5-methyl cytosine with phosphorothioate linkage
  modified_base 2: mod_base = OTHER; note = 2'-O-methoxyethyl modified thymine
  modified_base 3: mod_base = OTHER; note = 2'-O-methoxyethyl modified thymine
  modified_base 4: mod_base = OTHER; note = 2'-O-methoxyethyl modified thymine
  modified_base 5: mod_base = OTHER; note = 2'-O-methoxyethyl modified 5-methyl cytosine
  modified_base 6: mod_base = OTHER; note = 2'-O-methoxyethyl modified nucleotide with phosphorothioate linkage
  modified_base 7: mod_base = OTHER; note = 2'-O-methoxyethyl modified thymine with phosphorothioate linkage
  modified_base 8: mod_base = OTHER; note = 2'-O-methoxyethyl modified nucleotide with phosphorothioate linkage
  modified_base 9: mod_base = OTHER; note = 2'-O-methoxyethyl modified nucleotide with phosphorothioate linkage
  modified_base 10: mod_base = OTHER; note = 2'-O-methoxyethyl modified thymine with phosphorothioate linkage
  modified_base 11: mod_base = OTHER; note = 2'-O-methoxyethyl modified nucleotide
  modified_base 12: mod_base = OTHER; note = 2'-O-methoxyethyl modified 5-methyl cytosine
  modified_base 13: mod_base = OTHER; note = 2'-O-methoxyethyl modified thymine
  modified_base 14: mod_base = OTHER; note = 2'-O-methoxyethyl modified nucleotide with phosphorothioate linkage
  modified_base 15: mod_base = OTHER; note = 2'-O-methoxyethyl modified nucleotide with phosphorothioate linkage
  modified_base 16: mod_base = OTHER; note = 2'-O-methoxyethyl modified 5-methyl cytosine
ctttcataatgctggc

SEQ ID NO: 74 - RNA, 17 nt, synthetic construct
  source 1..17: mol_type = other RNA
  modified_base 1: mod_base = OTHER; note = 2'-O-methoxyethyl modified nucleotide with phosphorothioate linkage
  modified_base 2: mod_base = OTHER; note = 2'-O-methoxyethyl modified 5-methyl cytosine with phosphorothioate linkage
  modified_base 3: mod_base = OTHER; note = 2'-O-methoxyethyl modified thymine with phosphorothioate linkage
  modified_base 4: mod_base = OTHER; note = 2'-O-methoxyethyl modified thymine with phosphorothioate linkage
  modified_base 5: mod_base = OTHER; note = 2'-O-methoxyethyl modified thymine with phosphorothioate linkage
  modified_base 6: mod_base = OTHER; note = 2'-O-methoxyethyl modified 5-methyl cytosine with phosphorothioate linkage
  modified_base 7: mod_base = OTHER; note = 2'-O-methoxyethyl modified nucleotide with phosphorothioate linkage
  modified_base 8: mod_base = OTHER; note = 2'-O-methoxyethyl modified thymine with phosphorothioate linkage
  modified_base 9: mod_base = OTHER; note = 2'-O-methoxyethyl modified nucleotide with phosphorothioate linkage
  modified_base 10: mod_base = OTHER; note = 2'-O-methoxyethyl modified nucleotide with phosphorothioate linkage
  modified_base 11: mod_base = OTHER; note = 2'-O-methoxyethyl modified thymine
  modified_base 12: mod_base = OTHER; note = 2'-O-methoxyethyl modified nucleotide
  modified_base 13: mod_base = OTHER; note = 2'-O-methoxyethyl modified 5-methyl cytosine
  modified_base 14: mod_base = OTHER; note = 2'-O-methoxyethyl modified thymine
  modified_base 15: mod_base = OTHER; note = 2'-O-methoxyethyl modified nucleotide with phosphorothioate linkage
  modified_base 16: mod_base = OTHER; note = 2'-O-methoxyethyl modified nucleotide with phosphorothioate linkage
  modified_base 17: mod_base = OTHER; note = 2'-O-methoxyethyl modified 5-methyl cytosine
actttcataatgctggc

SEQ ID NO: 75 - RNA, 17 nt, synthetic construct
  source 1..17: mol_type = other RNA
  modified_base 1: mod_base = OTHER; note = 2'-O-methoxyethyl modified nucleotide with phosphorothioate linkage
  modified_base 2: mod_base = OTHER; note = 2'-O-methoxyethyl modified 5-methyl cytosine with phosphorothioate linkage
  modified_base 3: mod_base = OTHER; note = 2'-O-methoxyethyl modified thymine with phosphorothioate linkage
  modified_base 4: mod_base = OTHER; note = 2'-O-methoxyethyl modified thymine with phosphorothioate linkage
  modified_base 5: mod_base = OTHER; note = 2'-O-methoxyethyl modified thymine with phosphorothioate linkage
  modified_base 6: mod_base = OTHER; note = 2'-O-methoxyethyl modified 5-methyl cytosine with phosphorothioate linkage
  modified_base 7: mod_base = OTHER; note = 2'-O-methoxyethyl modified nucleotide with phosphorothioate linkage
  modified_base 8: mod_base = OTHER; note = 2'-O-methoxyethyl modified thymine with phosphorothioate linkage
  modified_base 9: mod_base = OTHER; note = 2'-O-methoxyethyl modified nucleotide
  modified_base 10: mod_base = OTHER; note = 2'-O-methoxyethyl modified nucleotide
  modified_base 11: mod_base = OTHER; note = 2'-O-methoxyethyl modified thymine
  modified_base 12: mod_base = OTHER; note = 2'-O-methoxyethyl modified nucleotide
  modified_base 13: mod_base = OTHER; note = 2'-O-methoxyethyl modified 5-methyl cytosine with phosphorothioate linkage
  modified_base 14: mod_base = OTHER; note = 2'-O-methoxyethyl modified thymine with phosphorothioate linkage
  modified_base 15: mod_base = OTHER; note = 2'-O-methoxyethyl modified nucleotide with phosphorothioate linkage
  modified_base 16: mod_base = OTHER; note = 2'-O-methoxyethyl modified nucleotide with phosphorothioate linkage
  modified_base 17: mod_base = OTHER; note = 2'-O-methoxyethyl modified 5-methyl cytosine
actttcataatgctggc

SEQ ID NO: 76 - RNA, 17 nt, synthetic construct
  source 1..17: mol_type = other RNA
  modified_base 1: mod_base = OTHER; note = 2'-O-methoxyethyl modified nucleotide with phosphorothioate linkage
  modified_base 2: mod_base = OTHER; note = 2'-O-methoxyethyl modified 5-methyl cytosine with phosphorothioate linkage
  modified_base 3: mod_base = OTHER; note = 2'-O-methoxyethyl modified thymine with phosphorothioate linkage
  modified_base 4: mod_base = OTHER; note = 2'-O-methoxyethyl modified thymine with phosphorothioate linkage
  modified_base 5: mod_base = OTHER; note = 2'-O-methoxyethyl modified thymine with phosphorothioate linkage
  modified_base 6: mod_base = OTHER; note = 2'-O-methoxyethyl modified 5-methyl cytosine with phosphorothioate linkage
  modified_base 7: mod_base = OTHER; note = 2'-O-methoxyethyl modified nucleotide with phosphorothioate linkage
  modified_base 8: mod_base = OTHER; note = 2'-O-methoxyethyl modified thymine
  modified_base 9: mod_base = OTHER; note = 2'-O-methoxyethyl modified nucleotide
  modified_base 10: mod_base = OTHER; note = 2'-O-methoxyethyl modified nucleotide
  modified_base 11: mod_base = OTHER; note = 2'-O-methoxyethyl modified thymine with phosphorothioate linkage
  modified_base 12: mod_base = OTHER; note = 2'-O-methoxyethyl modified nucleotide with phosphorothioate linkage
  modified_base 13: mod_base = OTHER; note = 2'-O-methoxyethyl modified 5-methyl cytosine with phosphorothioate linkage
  modified_base 14: mod_base = OTHER; note = 2'-O-methoxyethyl modified thymine with phosphorothioate linkage
  modified_base 15: mod_base = OTHER; note = 2'-O-methoxyethyl modified nucleotide with phosphorothioate linkage
  modified_base 16: mod_base = OTHER; note = 2'-O-methoxyethyl modified nucleotide with phosphorothioate linkage
  modified_base 17: mod_base = OTHER; note = 2'-O-methoxyethyl modified 5-methyl cytosine
actttcataatgctggc

SEQ ID NO: 77 - RNA, 17 nt, synthetic construct
  source 1..17: mol_type = other RNA
  modified_base 1: mod_base = OTHER; note = 2'-O-methoxyethyl modified nucleotide with phosphorothioate linkage
  modified_base 2: mod_base = OTHER; note = 2'-O-methoxyethyl modified 5-methyl cytosine with phosphorothioate linkage
  modified_base 3: mod_base = OTHER; note = 2'-O-methoxyethyl modified thymine with phosphorothioate linkage
  modified_base 4: mod_base = OTHER; note = 2'-O-methoxyethyl modified thymine with phosphorothioate linkage
  modified_base 5: mod_base = OTHER; note = 2'-O-methoxyethyl modified thymine with phosphorothioate linkage
  modified_base 6: mod_base = OTHER; note = 2'-O-methoxyethyl modified 5-methyl cytosine with phosphorothioate linkage
  modified_base 7: mod_base = OTHER; note = 2'-O-methoxyethyl modified nucleotide
  modified_base 8: mod_base = OTHER; note = 2'-O-methoxyethyl modified thymine
  modified_base 9: mod_base = OTHER; note = 2'-O-methoxyethyl modified nucleotide
  modified_base 10: mod_base = OTHER; note = 2'-O-methoxyethyl modified nucleotide
  modified_base 11: mod_base = OTHER; note = 2'-O-methoxyethyl modified thymine with phosphorothioate linkage
  modified_base 12: mod_base = OTHER; note = 2'-O-methoxyethyl modified nucleotide with phosphorothioate linkage
  modified_base 13: mod_base = OTHER; note = 2'-O-methoxyethyl modified 5-methyl cytosine with phosphorothioate linkage
  modified_base 14: mod_base = OTHER; note = 2'-O-methoxyethyl modified thymine with phosphorothioate linkage
  modified_base 15: mod_base = OTHER; note = 2'-O-methoxyethyl modified nucleotide with phosphorothioate linkage
  modified_base 16: mod_base = OTHER; note = 2'-O-methoxyethyl modified nucleotide with phosphorothioate linkage
  modified_base 17: mod_base = OTHER; note = 2'-O-methoxyethyl modified 5-methyl cytosine
actttcataatgctggc

SEQ ID NO: 78 - RNA, 17 nt, synthetic construct
  source 1..17: mol_type = other RNA
  modified_base 1: mod_base = OTHER; note = 2'-O-methoxyethyl modified nucleotide with phosphorothioate linkage
  modified_base 2: mod_base = OTHER; note = 2'-O-methoxyethyl modified 5-methyl cytosine with phosphorothioate linkage
  modified_base 3: mod_base = OTHER; note = 2'-O-methoxyethyl modified thymine with phosphorothioate linkage
  modified_base 4: mod_base = OTHER; note = 2'-O-methoxyethyl modified thymine with phosphorothioate linkage
  modified_base 5: mod_base = OTHER; note = 2'-O-methoxyethyl modified thymine with phosphorothioate linkage
  modified_base 6: mod_base = OTHER; note = 2'-O-methoxyethyl modified 5-methyl cytosine with phosphorothioate linkage
  modified_base 7: mod_base = OTHER; note = 2'-O-methoxyethyl modified nucleotide
  modified_base 8: mod_base = OTHER; note = 2'-O-methoxyethyl modified thymine
  modified_base 9: mod_base = OTHER; note = 2'-O-methoxyethyl modified nucleotide
  modified_base 10: mod_base = OTHER; note = 2'-O-methoxyethyl modified nucleotide
  modified_base 11: mod_base = OTHER; note = 2'-O-methoxyethyl modified thymine
  modified_base 12: mod_base = OTHER; note = 2'-O-methoxyethyl modified nucleotide with phosphorothioate linkage
  modified_base 13: mod_base = OTHER; note = 2'-O-methoxyethyl modified 5-methyl cytosine with phosphorothioate linkage
  modified_base 14: mod_base = OTHER; note = 2'-O-methoxyethyl modified thymine with phosphorothioate linkage
  modified_base 15: mod_base = OTHER; note = 2'-O-methoxyethyl modified nucleotide with phosphorothioate linkage
  modified_base 16: mod_base = OTHER; note = 2'-O-methoxyethyl modified nucleotide with phosphorothioate linkage
  modified_base 17: mod_base = OTHER; note = 2'-O-methoxyethyl modified 5-methyl cytosine
actttcataatgctggc

SEQ ID NO: 79 - RNA, 17 nt, synthetic construct
  source 1..17: mol_type = other RNA
  modified_base 1: mod_base = OTHER; note = 2'-O-methoxyethyl modified nucleotide with phosphorothioate linkage
  modified_base 2: mod_base = OTHER; note = 2'-O-methoxyethyl modified 5-methyl cytosine with phosphorothioate linkage
  modified_base 3: mod_base = OTHER; note = 2'-O-methoxyethyl modified thymine with phosphorothioate linkage
  modified_base 4: mod_base = OTHER; note = 2'-O-methoxyethyl modified thymine with phosphorothioate linkage
  modified_base 5: mod_base = OTHER; note = 2'-O-methoxyethyl modified thymine with phosphorothioate linkage
  modified_base 6: mod_base = OTHER; note = 2'-O-methoxyethyl modified 5-methyl cytosine
  modified_base 7: mod_base = OTHER; note = 2'-O-methoxyethyl modified nucleotide
  modified_base 8: mod_base = OTHER; note = 2'-O-methoxyethyl modified thymine
  modified_base 9: mod_base = OTHER; note = 2'-O-methoxyethyl modified nucleotide
  modified_base 10: mod_base = OTHER; note = 2'-O-methoxyethyl modified nucleotide
  modified_base 11: mod_base = OTHER; note = 2'-O-methoxyethyl modified thymine
  modified_base 12: mod_base = OTHER; note = 2'-O-methoxyethyl modified nucleotide with phosphorothioate linkage
  modified_base 13: mod_base = OTHER; note = 2'-O-methoxyethyl modified 5-methyl cytosine with phosphorothioate linkage
  modified_base 14: mod_base = OTHER; note = 2'-O-methoxyethyl modified thymine with phosphorothioate linkage
  modified_base 15: mod_base = OTHER; note = 2'-O-methoxyethyl modified nucleotide with phosphorothioate linkage
  modified_base 16: mod_base = OTHER; note = 2'-O-methoxyethyl modified nucleotide with phosphorothioate linkage
  modified_base 17: mod_base = OTHER; note = 2'-O-methoxyethyl modified 5-methyl cytosine
actttcataatgctggc

SEQ ID NO: 80 - RNA, 17 nt, synthetic construct
  source 1..17: mol_type = other RNA
  modified_base 1: mod_base = OTHER; note = 2'-O-methoxyethyl modified nucleotide with phosphorothioate linkage
  modified_base 2: mod_base = OTHER; note = 2'-O-methoxyethyl modified 5-methyl cytosine with phosphorothioate linkage
  modified_base 3: mod_base = OTHER; note = 2'-O-methoxyethyl modified thymine with phosphorothioate linkage
  modified_base 4: mod_base = OTHER; note = 2'-O-methoxyethyl modified thymine with phosphorothioate linkage
  modified_base 5: mod_base = OTHER; note = 2'-O-methoxyethyl modified thymine with phosphorothioate linkage
  modified_base 6: mod_base = OTHER; note = 2'-O-methoxyethyl modified 5-methyl cytosine
  modified_base 7: mod_base = OTHER; note = 2'-O-methoxyethyl modified nucleotide
  modified_base 8: mod_base = OTHER; note = 2'-O-methoxyethyl modified thymine
  modified_base 9: mod_base = OTHER; note = 2'-O-methoxyethyl modified nucleotide
  modified_base 10: mod_base = OTHER; note = 2'-O-methoxyethyl modified nucleotide
  modified_base 11: mod_base = OTHER; note = 2'-O-methoxyethyl modified thymine
  modified_base 12: mod_base = OTHER; note = 2'-O-methoxyethyl modified nucleotide
  modified_base 13: mod_base = OTHER; note = 2'-O-methoxyethyl modified 5-methyl cytosine with phosphorothioate linkage
  modified_base 14: mod_base = OTHER; note = 2'-O-methoxyethyl modified thymine with phosphorothioate linkage
  modified_base 15: mod_base = OTHER; note = 2'-O-methoxyethyl modified nucleotide with phosphorothioate linkage
  modified_base 16: mod_base = OTHER; note = 2'-O-methoxyethyl modified nucleotide with phosphorothioate linkage
  modified_base 17: mod_base = OTHER; note = 2'-O-methoxyethyl modified 5-methyl cytosine
actttcataatgctggc

SEQ ID NO: 81 - RNA, 17 nt, synthetic construct
  source 1..17: mol_type = other RNA
  modified_base 1: mod_base = OTHER; note = 2'-O-methoxyethyl modified nucleotide with phosphorothioate linkage
  modified_base 2: mod_base = OTHER; note = 2'-O-methoxyethyl modified 5-methyl cytosine with phosphorothioate linkage
  modified_base 3: mod_base = OTHER; note = 2'-O-methoxyethyl modified thymine with phosphorothioate linkage
  modified_base 4: mod_base = OTHER; note = 2'-O-methoxyethyl modified thymine with phosphorothioate linkage
  modified_base 5: mod_base = OTHER; note = 2'-O-methoxyethyl modified thymine
  modified_base 6: mod_base = OTHER; note = 2'-O-methoxyethyl modified 5-methyl cytosine
  modified_base 7: mod_base = OTHER; note = 2'-O-methoxyethyl modified nucleotide
  modified_base 8: mod_base = OTHER; note = 2'-O-methoxyethyl modified thymine
  modified_base 9: mod_base = OTHER; note = 2'-O-methoxyethyl modified nucleotide with phosphorothioate linkage
  modified_base 10: mod_base = OTHER; note = 2'-O-methoxyethyl modified nucleotide with phosphorothioate linkage
  modified_base 11: mod_base = OTHER; note = 2'-O-methoxyethyl modified thymine with phosphorothioate linkage
  modified_base 12: mod_base = OTHER; note = 2'-O-methoxyethyl modified nucleotide with phosphorothioate linkage
  modified_base 13: mod_base = OTHER; note = 2'-O-methoxyethyl modified 5-methyl cytosine with phosphorothioate linkage
  modified_base 14: mod_base = OTHER; note = 2'-O-methoxyethyl modified thymine with phosphorothioate linkage
  modified_base 15: mod_base = OTHER; note = 2'-O-methoxyethyl modified nucleotide with phosphorothioate linkage
  modified_base 16: mod_base = OTHER; note = 2'-O-methoxyethyl modified nucleotide with phosphorothioate linkage
  modified_base 17: mod_base = OTHER; note = 2'-O-methoxyethyl modified 5-methyl cytosine
actttcataatgctggc

SEQ ID NO: 82 - RNA, 17 nt, synthetic construct
  source 1..17: mol_type = other RNA
  modified_base 1: mod_base = OTHER; note = 2'-O-methoxyethyl modified nucleotide with phosphorothioate linkage
  modified_base 2: mod_base = OTHER; note = 2'-O-methoxyethyl modified 5-methyl cytosine with phosphorothioate linkage
  modified_base 3: mod_base = OTHER; note = 2'-O-methoxyethyl modified thymine
  modified_base 4: mod_base = OTHER; note = 2'-O-methoxyethyl modified thymine with phosphorothioate linkage
  modified_base 5: mod_base = OTHER; note = 2'-O-methoxyethyl modified thymine with phosphorothioate linkage
  modified_base 6: mod_base = OTHER; note = 2'-O-methoxyethyl modified 5-methyl cytosine with phosphorothioate linkage
  modified_base 7: mod_base = OTHER; note = 2'-O-methoxyethyl modified nucleotide with phosphorothioate linkage
  modified_base 8: mod_base = OTHER; note = 2'-O-methoxyethyl modified thymine with phosphorothioate linkage
  modified_base 9: mod_base = OTHER; note = 2'-O-methoxyethyl modified nucleotide with phosphorothioate linkage
  modified_base 10: mod_base = OTHER; note = 2'-O-methoxyethyl modified nucleotide with phosphorothioate linkage
  modified_base 11: mod_base = OTHER; note = 2'-O-methoxyethyl modified thymine with phosphorothioate linkage
  modified_base 12: mod_base = OTHER; note = 2'-O-methoxyethyl modified nucleotide with phosphorothioate linkage
  modified_base 13: mod_base = OTHER; note = 2'-O-methoxyethyl modified 5-methyl cytosine with phosphorothioate linkage
  modified_base 14: mod_base = OTHER; note = 2'-O-methoxyethyl modified thymine
  modified_base 15: mod_base = OTHER; note = 2'-O-methoxyethyl modified nucleotide with phosphorothioate linkage
  modified_base 16: mod_base = OTHER; note = 2'-O-methoxyethyl modified nucleotide with phosphorothioate linkage
  modified_base 17: mod_base = OTHER; note = 2'-O-methoxyethyl modified 5-methyl cytosine
actttcataatgctggc

SEQ ID NO: 83 - RNA, 17 nt, synthetic construct
  source 1..17: mol_type = other RNA
  modified_base 1: mod_base = OTHER; note = 2'-O-methoxyethyl modified nucleotide with phosphorothioate linkage
  modified_base 2: mod_base = OTHER; note = 2'-O-methoxyethyl modified 5-methyl cytosine with phosphorothioate linkage
  modified_base 3: mod_base = OTHER; note = 2'-O-methoxyethyl modified thymine
  modified_base 4: mod_base = OTHER; note = 2'-O-methoxyethyl modified thymine with phosphorothioate linkage
  modified_base 5: mod_base = OTHER; note = 2'-O-methoxyethyl modified thymine with phosphorothioate linkage
  modified_base 6: mod_base = OTHER; note = 2'-O-methoxyethyl modified 5-methyl cytosine with phosphorothioate linkage
  modified_base 7: mod_base = OTHER; note = 2'-O-methoxyethyl modified nucleotide with phosphorothioate linkage
  modified_base 8: mod_base = OTHER; note = 2'-O-methoxyethyl modified thymine with phosphorothioate linkage
  modified_base 9: mod_base = OTHER; note = 2'-O-methoxyethyl modified nucleotide
  modified_base 10: mod_base = OTHER; note = 2'-O-methoxyethyl modified nucleotide with phosphorothioate linkage
  modified_base 11: mod_base = OTHER; note = 2'-O-methoxyethyl modified thymine with phosphorothioate linkage
  modified_base 12: mod_base = OTHER; note = 2'-O-methoxyethyl modified nucleotide with phosphorothioate linkage
  modified_base 13: mod_base = OTHER; note = 2'-O-methoxyethyl modified 5-methyl cytosine with phosphorothioate linkage
  modified_base 14: mod_base = OTHER; note = 2'-O-methoxyethyl modified thymine
  modified_base 15: mod_base = OTHER; note = 2'-O-methoxyethyl modified nucleotide with phosphorothioate linkage
  modified_base 16: mod_base = OTHER; note = 2'-O-methoxyethyl modified nucleotide with phosphorothioate linkage
  modified_base 17: mod_base = OTHER; note = 2'-O-methoxyethyl modified 5-methyl cytosine
actttcataatgctggc

SEQ ID NO: 84 - RNA, 17 nt, synthetic construct
  source 1..17: mol_type = other RNA
  modified_base 1: mod_base = OTHER; note = 2'-O-methoxyethyl modified nucleotide with phosphorothioate linkage
  modified_base 2: mod_base = OTHER; note = 2'-O-methoxyethyl modified 5-methyl cytosine with phosphorothioate linkage
  modified_base 3: mod_base = OTHER; note = 2'-O-methoxyethyl modified thymine
  modified_base 4: mod_base = OTHER; note = 2'-O-methoxyethyl modified thymine with phosphorothioate linkage
  modified_base 5: mod_base = OTHER; note = 2'-O-methoxyethyl modified thymine with phosphorothioate linkage
  modified_base 6: mod_base = OTHER; note = 2'-O-methoxyethyl modified 5-methyl cytosine with phosphorothioate linkage
  modified_base 7: mod_base = OTHER; note = 2'-O-methoxyethyl modified nucleotide
  modified_base 8: mod_base = OTHER; note = 2'-O-methoxyethyl modified thymine with phosphorothioate linkage
  modified_base 9: mod_base = OTHER; note = 2'-O-methoxyethyl modified nucleotide with phosphorothioate linkage
  modified_base 10: mod_base = OTHER; note = 2'-O-methoxyethyl modified nucleotide with phosphorothioate linkage
  modified_base 11: mod_base = OTHER; note = 2'-O-methoxyethyl modified thymine
  modified_base 12: mod_base = OTHER; note = 2'-O-methoxyethyl modified nucleotide with phosphorothioate linkage
  modified_base 13: mod_base = OTHER; note = 2'-O-methoxyethyl modified 5-methyl cytosine with phosphorothioate linkage
  modified_base 14: mod_base = OTHER; note = 2'-O-methoxyethyl modified thymine
  modified_base 15: mod_base = OTHER; note = 2'-O-methoxyethyl modified nucleotide with phosphorothioate linkage
  modified_base 16: mod_base = OTHER; note = 2'-O-methoxyethyl modified nucleotide with phosphorothioate linkage
  modified_base 17: mod_base = OTHER; note = 2'-O-methoxyethyl modified 5-methyl cytosine
actttcataatgctggc

SEQ ID NO: 85 - RNA, 17 nt, synthetic construct
  source 1..17: mol_type = other RNA
  modified_base 1: mod_base = OTHER; note = 2'-O-methoxyethyl modified nucleotide with phosphorothioate linkage
  modified_base 2: mod_base = OTHER; note = 2'-O-methoxyethyl modified 5-methyl cytosine with phosphorothioate linkage
  modified_base 3: mod_base = OTHER; note = 2'-O-methoxyethyl modified thymine
  modified_base 4: mod_base = OTHER; note = 2'-O-methoxyethyl modified thymine with phosphorothioate linkage
  modified_base 5: mod_base = OTHER; note = 2'-O-methoxyethyl modified thymine with phosphorothioate linkage
  modified_base 6: mod_base = OTHER; note = 2'-O-methoxyethyl modified 5-methyl cytosine
  modified_base 7: mod_base = OTHER; note = 2'-O-methoxyethyl modified nucleotide with phosphorothioate linkage
  modified_base 8: mod_base = OTHER; note = 2'-O-methoxyethyl modified thymine with phosphorothioate linkage
  modified_base 9: mod_base = OTHER; note = 2'-O-methoxyethyl modified nucleotide
  modified_base 10: mod_base = OTHER; note = 2'-O-methoxyethyl modified nucleotide with phosphorothioate linkage
  modified_base 11: mod_base = OTHER; note = 2'-O-methoxyethyl modified thymine with phosphorothioate linkage
  modified_base 12: mod_base = OTHER; note = 2'-O-methoxyethyl modified nucleotide
  modified_base 13: mod_base = OTHER; note = 2'-O-methoxyethyl modified 5-methyl cytosine with phosphorothioate linkage
  modified_base 14: mod_base = OTHER; note = 2'-O-methoxyethyl modified thymine
  modified_base 15: mod_base = OTHER; note = 2'-O-methoxyethyl modified nucleotide with phosphorothioate linkage
  modified_base 16: mod_base = OTHER; note = 2'-O-methoxyethyl modified nucleotide with phosphorothioate linkage
  modified_base 17: mod_base = OTHER; note = 2'-O-methoxyethyl modified 5-methyl cytosine
actttcataatgctggc

SEQ ID NO: 86 - RNA, 17 nt, synthetic construct
  source 1..17: mol_type = other RNA
  modified_base 1: mod_base = OTHER; note = 2'-O-methoxyethyl modified nucleotide with phosphorothioate linkage
  modified_base 2: mod_base = OTHER; note = 2'-O-methoxyethyl modified 5-methyl cytosine with phosphorothioate linkage
  modified_base 3: mod_base = OTHER; note = 2'-O-methoxyethyl modified thymine
  modified_base 4: mod_base = OTHER; note = 2'-O-methoxyethyl modified thymine with phosphorothioate linkage
  modified_base 5: mod_base = OTHER; note = 2'-O-methoxyethyl modified thymine
  modified_base 6: mod_base = OTHER; note = 2'-O-methoxyethyl modified 5-methyl cytosine with phosphorothioate linkage
  modified_base 7: mod_base = OTHER; note = 2'-O-methoxyethyl modified nucleotide
  modified_base 8: mod_base = OTHER; note = 2'-O-methoxyethyl modified thymine with phosphorothioate linkage
  modified_base 9: mod_base = OTHER; note = 2'-O-methoxyethyl modified nucleotide
  modified_base 10: mod_base = OTHER; note = 2'-O-methoxyethyl modified nucleotide with phosphorothioate linkage
  modified_base 11: mod_base = OTHER; note = 2'-O-methoxyethyl modified thymine
  modified_base 12: mod_base = OTHER; note = 2'-O-methoxyethyl modified nucleotide with phosphorothioate linkage
  modified_base 13: mod_base = OTHER; note = 2'-O-methoxyethyl modified 5-methyl cytosine
  modified_base 14: mod_base = OTHER; note = 2'-O-methoxyethyl modified thymine with phosphorothioate linkage
  modified_base 15: mod_base = OTHER; note = 2'-O-methoxyethyl modified nucleotide with phosphorothioate linkage
  modified_base 16: mod_base = OTHER; note = 2'-O-methoxyethyl modified nucleotide with phosphorothioate linkage
  modified_base 17: mod_base = OTHER; note = 2'-O-methoxyethyl modified 5-methyl cytosine
actttcataatgctggc

SEQ ID NO: 87 - RNA, 17 nt, synthetic construct
  source 1..17: mol_type = other RNA
  modified_base 1: mod_base = OTHER; note = 2'-O-methoxyethyl modified nucleotide with phosphorothioate linkage
  modified_base 2: mod_base = OTHER; note = 2'-O-methoxyethyl modified 5-methyl cytosine with phosphorothioate linkage
  modified_base 3: mod_base = OTHER; note = 2'-O-methoxyethyl modified thymine
  modified_base 4: mod_base = OTHER; note = 2'-O-methoxyethyl modified thymine
  modified_base 5: mod_base = OTHER; note = 2'-O-methoxyethyl modified thymine
  modified_base 6: mod_base = OTHER; note = 2'-O-methoxyethyl modified 5-methyl cytosine
  modified_base 7: mod_base = OTHER; note = 2'-O-methoxyethyl modified nucleotide with phosphorothioate linkage
  modified_base 8: mod_base = OTHER; note = 2'-O-methoxyethyl modified thymine with phosphorothioate linkage
  modified_base 9: mod_base = OTHER; note = 2'-O-methoxyethyl modified nucleotide with phosphorothioate linkage
  modified_base 10: mod_base = OTHER; note = 2'-O-methoxyethyl modified nucleotide with phosphorothioate linkage
  modified_base 11: mod_base = OTHER; note = 2'-O-methoxyethyl modified thymine with phosphorothioate linkage
  modified_base 12: mod_base = OTHER; note = 2'-O-methoxyethyl modified nucleotide with phosphorothioate linkage
  modified_base 13: mod_base = OTHER; note = 2'-O-methoxyethyl modified 5-methyl cytosine with phosphorothioate linkage
  modified_base 14: mod_base = OTHER; note = 2'-O-methoxyethyl modified thymine with phosphorothioate linkage
  modified_base 15: mod_base = OTHER; note = 2'-O-methoxyethyl modified nucleotide with phosphorothioate linkage
  modified_base 16: mod_base = OTHER; note = 2'-O-methoxyethyl modified nucleotide with phosphorothioate linkage
  modified_base 17: mod_base = OTHER; note = 2'-O-methoxyethyl modified 5-methyl cytosine
actttcataatgctggc

SEQ ID NO: 88 - RNA, 17 nt, synthetic construct
  source 1..17: mol_type = other RNA
  modified_base 1: mod_base = OTHER; note = 2'-O-methoxyethyl modified nucleotide with phosphorothioate linkage
  modified_base 2: mod_base = OTHER; note = 2'-O-methoxyethyl modified 5-methyl cytosine
  modified_base 3: mod_base = OTHER; note = 2'-O-methoxyethyl modified thymine
  modified_base 4: mod_base = OTHER; note = 2'-O-methoxyethyl modified thymine with phosphorothioate linkage
  modified_base 5: mod_base = OTHER; note = 2'-O-methoxyethyl modified thymine with phosphorothioate linkage
  modified_base 6: mod_base = OTHER; note = 2'-O-methoxyethyl modified 5-methyl cytosine with phosphorothioate linkage
  modified_base 7: mod_base = OTHER; note = 2'-O-methoxyethyl modified nucleotide with phosphorothioate linkage
  modified_base 8: mod_base = OTHER; note = 2'-O-methoxyethyl modified thymine with phosphorothioate linkage
  modified_base 9: mod_base = OTHER; note = 2'-O-methoxyethyl modified nucleotide with phosphorothioate linkage
  modified_base 10: mod_base = OTHER; note = 2'-O-methoxyethyl modified nucleotide with phosphorothioate linkage
  modified_base 11: mod_base = OTHER; note = 2'-O-methoxyethyl modified thymine with phosphorothioate linkage
  modified_base 12: mod_base = OTHER; note = 2'-O-methoxyethyl modified nucleotide with phosphorothioate linkage
  modified_base 13: mod_base = OTHER; note = 2'-O-methoxyethyl modified 5-methyl cytosine
  modified_base 14: mod_base = OTHER; note = 2'-O-methoxyethyl modified thymine
  modified_base 15: mod_base = OTHER; note = 2'-O-methoxyethyl modified nucleotide with phosphorothioate linkage
  modified_base 16: mod_base = OTHER; note = 2'-O-methoxyethyl modified nucleotide with phosphorothioate linkage
  modified_base 17: mod_base = OTHER; note = 2'-O-methoxyethyl modified 5-methyl cytosine
actttcataatgctggc

SEQ ID NO: 89 - RNA, 17 nt, synthetic construct
  source 1..17: mol_type = other RNA
  modified_base 1: mod_base = OTHER; note = 2'-O-methoxyethyl modified nucleotide with phosphorothioate linkage
  modified_base 2: mod_base = OTHER; note = 2'-O-methoxyethyl modified 5-methyl cytosine
  modified_base 3: mod_base = OTHER; note = 2'-O-methoxyethyl modified thymine
  modified_base 4: mod_base = OTHER; note = 2'-O-methoxyethyl modified thymine
  modified_base 5: mod_base = OTHER; note = 2'-O-methoxyethyl modified thymine with phosphorothioate linkage
  modified_base 6: mod_base = OTHER; note = 2'-O-methoxyethyl modified 5-methyl cytosine with phosphorothioate linkage
  modified_base 7: mod_base = OTHER; note = 2'-O-methoxyethyl modified nucleotide with phosphorothioate linkage
  modified_base 8: mod_base = OTHER; note = 2'-O-methoxyethyl modified thymine with phosphorothioate linkage
  modified_base 9: mod_base = OTHER; note = 2'-O-methoxyethyl modified nucleotide with phosphorothioate linkage
  modified_base 10: mod_base = OTHER; note = 2'-O-methoxyethyl modified nucleotide with phosphorothioate linkage
  modified_base 11: mod_base = OTHER; note = 2'-O-methoxyethyl modified thymine with phosphorothioate linkage
  modified_base 12: mod_base = OTHER; note = 2'-O-methoxyethyl modified nucleotide with phosphorothioate linkage
  modified_base 13: mod_base = OTHER; note = 2'-O-methoxyethyl modified 5-methyl cytosine
  modified_base 14: mod_base = OTHER; note = 2'-O-methoxyethyl modified thymine
  modified_base 15: mod_base = OTHER; note = 2'-O-methoxyethyl modified nucleotide with phosphorothioate linkage
  modified_base 16: mod_base = OTHER; note = 2'-O-methoxyethyl modified nucleotide with phosphorothioate linkage
  modified_base 17: mod_base = OTHER; note = 2'-O-methoxyethyl modified 5-methyl cytosine
actttcataatgctggc

SEQ ID NO: 90 - RNA, 17 nt, synthetic construct
  source 1..17: mol_type = other RNA
  modified_base 1: mod_base = OTHER; note = 2'-O-methoxyethyl modified nucleotide with phosphorothioate linkage
  modified_base 2: mod_base = OTHER; note = 2'-O-methoxyethyl modified 5-methyl cytosine
  modified_base 3: mod_base = OTHER; note = 2'-O-methoxyethyl modified thymine
  modified_base 4: mod_base = OTHER; note = 2'-O-methoxyethyl modified thymine
  modified_base 5: mod_base = OTHER; note = 2'-O-methoxyethyl modified thymine with phosphorothioate linkage
  modified_base 6: mod_base = OTHER; note = 2'-O-methoxyethyl modified 5-methyl cytosine with phosphorothioate linkage
  modified_base 7: mod_base = OTHER; note = 2'-O-methoxyethyl modified nucleotide with phosphorothioate linkage
  modified_base 8: mod_base = OTHER; note = 2'-O-methoxyethyl modified thymine with phosphorothioate linkage
  modified_base 9: mod_base = OTHER; note = 2'-O-methoxyethyl modified nucleotide with phosphorothioate linkage
  modified_base 10: mod_base = OTHER; note = 2'-O-methoxyethyl modified nucleotide with phosphorothioate linkage
  modified_base 11: mod_base = OTHER; note = 2'-O-methoxyethyl modified thymine with phosphorothioate linkage
  modified_base 12: mod_base = OTHER; note = 2'-O-methoxyethyl modified nucleotide
  modified_base 13: mod_base = OTHER; note = 2'-O-methoxyethyl modified 5-methyl cytosine
  modified_base 14: mod_base = OTHER; note = 2'-O-methoxyethyl modified thymine
  modified_base 15: mod_base = OTHER; note = 2'-O-methoxyethyl modified nucleotide with phosphorothioate linkage
  modified_base 16: mod_base = OTHER; note = 2'-O-methoxyethyl modified nucleotide with phosphorothioate linkage
  modified_base 17: mod_base = OTHER; note = 2'-O-methoxyethyl modified 5-methyl cytosine
actttcataatgctggc

SEQ ID NO: 91 - RNA, 17 nt, synthetic construct
  source 1..17: mol_type = other RNA
  modified_base 1: mod_base = OTHER; note = 2'-O-methoxyethyl modified nucleotide with phosphorothioate linkage
  modified_base 2: mod_base = OTHER; note = 2'-O-methoxyethyl modified 5-methyl cytosine
  modified_base 3: mod_base = OTHER; note = 2'-O-methoxyethyl modified thymine
  modified_base 4: mod_base = OTHER; note = 2'-O-methoxyethyl modified thymine
  modified_base 5: mod_base = OTHER; note = 2'-O-methoxyethyl modified thymine
  modified_base 6: mod_base = OTHER; note = 2'-O-methoxyethyl modified 5-methyl cytosine with phosphorothioate linkage
  modified_base 7: mod_base = OTHER; note = 2'-O-methoxyethyl modified nucleotide with phosphorothioate linkage
  modified_base 8: mod_base = OTHER; note = 2'-O-methoxyethyl modified thymine with phosphorothioate linkage
  modified_base 9: mod_base = OTHER; note = 2'-O-methoxyethyl modified nucleotide with phosphorothioate linkage
  modified_base 10: mod_base = OTHER; note = 2'-O-methoxyethyl modified nucleotide with phosphorothioate linkage
  modified_base 11: mod_base = OTHER; note = 2'-O-methoxyethyl modified thymine with phosphorothioate linkage
  modified_base 12: mod_base = OTHER; note = 2'-O-methoxyethyl modified nucleotide
  modified_base 13: mod_base = OTHER; note = 2'-O-methoxyethyl modified 5-methyl cytosine
  modified_base 14: mod_base = OTHER; note = 2'-O-methoxyethyl modified thymine
  modified_base 15: mod_base = OTHER; note = 2'-O-methoxyethyl modified nucleotide with phosphorothioate linkage
  modified_base 16: mod_base = OTHER; note = 2'-O-methoxyethyl modified nucleotide with phosphorothioate linkage
  modified_base 17: mod_base = OTHER; note = 2'-O-methoxyethyl modified 5-methyl cytosine
actttcataatgctggc

SEQ ID NO: 92 - RNA, 18 nt, synthetic construct
  source 1..18: mol_type = other RNA
  modified_base 1: mod_base = OTHER; note = 2'-O-methoxyethyl modified 5-methyl cytosine with phosphorothioate linkage
  modified_base 2: mod_base = OTHER; note = 2'-O-methoxyethyl modified nucleotide with phosphorothioate linkage
  modified_base 3: mod_base = OTHER; note = 2'-O-methoxyethyl modified 5-methyl cytosine
  modified_base 4: mod_base = OTHER; note = 2'-O-methoxyethyl modified thymine with phosphorothioate linkage
  modified_base 5: mod_base = OTHER; note = 2'-O-methoxyethyl modified thymine with phosphorothioate linkage
  modified_base 6: mod_base = OTHER; note = 2'-O-methoxyethyl modified thymine with phosphorothioate linkage
  modified_base 7: mod_base = OTHER; note = 2'-O-methoxyethyl modified 5-methyl cytosine with phosphorothioate linkage
  modified_base 8: mod_base = OTHER; note = 2'-O-methoxyethyl modified nucleotide with phosphorothioate linkage
  modified_base 9: mod_base = OTHER; note = 2'-O-methoxyethyl modified thymine with phosphorothioate linkage
  modified_base 10: mod_base = OTHER; note = 2'-O-methoxyethyl modified nucleotide with phosphorothioate linkage
  modified_base 11: mod_base = OTHER; note = 2'-O-methoxyethyl modified nucleotide with phosphorothioate linkage
  modified_base 12: mod_base = OTHER; note = 2'-O-methoxyethyl modified thymine with phosphorothioate linkage
  modified_base 13: mod_base = OTHER; note = 2'-O-methoxyethyl modified nucleotide with phosphorothioate linkage
  modified_base 14: mod_base = OTHER; note = 2'-O-methoxyethyl modified 5-methyl cytosine with phosphorothioate linkage
  modified_base 15: mod_base = OTHER; note = 2'-O-methoxyethyl modified thymine with phosphorothioate linkage
  modified_base 16: mod_base = OTHER; note = 2'-O-methoxyethyl modified nucleotide with phosphorothioate linkage
  modified_base 17: mod_base = OTHER; note = 2'-O-methoxyethyl modified nucleotide with phosphorothioate linkage
  modified_base 18: mod_base = OTHER; note = 2'-O-methoxyethyl modified 5-methyl cytosine
cactttcataatgctggc

SEQ ID NO: 93 - RNA, 18 nt, synthetic construct
  source 1..18: mol_type = other RNA
  modified_base 1: mod_base = OTHER; note = 2'-O-methoxyethyl modified 5-methyl cytosine with phosphorothioate linkage
  modified_base 2: mod_base = OTHER; note = 2'-O-methoxyethyl modified nucleotide with phosphorothioate linkage
  modified_base 3: mod_base = OTHER; note = 2'-O-methoxyethyl modified 5-methyl cytosine with phosphorothioate linkage
  modified_base 4: mod_base = OTHER; note = 2'-O-methoxyethyl modified thymine with phosphorothioate linkage
  modified_base 5: mod_base = OTHER; note = 2'-O-methoxyethyl modified thymine
  modified_base 6: mod_base = OTHER; note = 2'-O-methoxyethyl modified thymine with phosphorothioate linkage
  modified_base 7: mod_base = OTHER; note = 2'-O-methoxyethyl modified 5-methyl cytosine with phosphorothioate linkage
  modified_base 8: mod_base = OTHER; note = 2'-O-methoxyethyl modified nucleotide with phosphorothioate linkage
  modified_base 9: mod_base = OTHER; note = 2'-O-methoxyethyl modified thymine with phosphorothioate linkage
  modified_base 10: mod_base = OTHER; note = 2'-O-methoxyethyl modified nucleotide with phosphorothioate linkage
  modified_base 11: mod_base = OTHER; note = 2'-O-methoxyethyl modified nucleotide with phosphorothioate linkage
  modified_base 12: mod_base = OTHER; note = 2'-O-methoxyethyl modified thymine with phosphorothioate linkage
  modified_base 13: mod_base = OTHER; note = 2'-O-methoxyethyl modified nucleotide with phosphorothioate linkage
  modified_base 14: mod_base = OTHER; note = 2'-O-methoxyethyl modified 5-methyl cytosine with phosphorothioate linkage
  modified_base 15: mod_base = OTHER; note = 2'-O-methoxyethyl modified thymine with phosphorothioate linkage
  modified_base 16: mod_base = OTHER; note = 2'-O-methoxyethyl modified nucleotide with phosphorothioate linkage
  modified_base 17: mod_base = OTHER; note = 2'-O-methoxyethyl modified nucleotide with phosphorothioate linkage
  modified_base 18: mod_base = OTHER; note = 2'-O-methoxyethyl modified 5-methyl cytosine
cactttcataatgctggc

SEQ ID NO: 94 - RNA, 18 nt, synthetic construct
  source 1..18: mol_type = other RNA
  modified_base 1: mod_base = OTHER; note = 2'-O-methoxyethyl modified 5-methyl cytosine with phosphorothioate linkage
  modified_base 2: mod_base = OTHER; note = 2'-O-methoxyethyl modified nucleotide with phosphorothioate linkage
  modified_base 3: mod_base = OTHER; note = 2'-O-methoxyethyl modified 5-methyl cytosine with phosphorothioate linkage
  modified_base 4: mod_base = OTHER; note = 2'-O-methoxyethyl modified thymine with phosphorothioate linkage
  modified_base 5: mod_base = OTHER; note = 2'-O-methoxyethyl modified thymine with phosphorothioate linkage
  modified_base 6: mod_base = OTHER; note = 2'-O-methoxyethyl modified thymine with phosphorothioate linkage
  modified_base 7: mod_base = OTHER; note = 2'-O-methoxyethyl modified 5-methyl cytosine
  modified_base 8: mod_base = OTHER; note = 2'-O-methoxyethyl modified nucleotide with phosphorothioate linkage
  modified_base 9: mod_base = OTHER; note = 2'-O-methoxyethyl modified thymine with phosphorothioate linkage
  modified_base 10: mod_base = OTHER; note = 2'-O-methoxyethyl modified nucleotide with phosphorothioate linkage
  modified_base 11: mod_base = OTHER; note = 2'-O-methoxyethyl modified nucleotide with phosphorothioate linkage
  modified_base 12: mod_base = OTHER; note = 2'-O-methoxyethyl modified thymine with phosphorothioate linkage
  modified_base 13: mod_base = OTHER; note = 2'-O-methoxyethyl modified nucleotide with phosphorothioate linkage
  modified_base 14: mod_base = OTHER; note = 2'-O-methoxyethyl modified 5-methyl cytosine with phosphorothioate linkage
  modified_base 15: mod_base = OTHER; note = 2'-O-methoxyethyl modified thymine with phosphorothioate linkage
  modified_base 16: mod_base = OTHER; note = 2'-O-methoxyethyl modified nucleotide with phosphorothioate linkage
  modified_base 17: mod_base = OTHER; note = 2'-O-methoxyethyl modified nucleotide with phosphorothioate linkage
  modified_base 18: mod_base = OTHER; note = 2'-O-methoxyethyl modified 5-methyl cytosine
cactttcataatgctggc

SEQ ID NO: 95 - RNA, 18 nt, synthetic construct
  source 1..18: mol_type = other RNA
  modified_base 1: mod_base = OTHER; note = 2'-O-methoxyethyl modified 5-methyl cytosine with phosphorothioate linkage
  modified_base 2: mod_base = OTHER; note = 2'-O-methoxyethyl modified nucleotide with phosphorothioate linkage
  modified_base 3: mod_base = OTHER; note = 2'-O-methoxyethyl modified 5-methyl cytosine with phosphorothioate linkage
  modified_base 4: mod_base = OTHER; note = 2'-O-methoxyethyl modified thymine with phosphorothioate linkage
  modified_base 5: mod_base = OTHER; note = 2'-O-methoxyethyl modified thymine with phosphorothioate linkage
  modified_base 6: mod_base = OTHER; note = 2'-O-methoxyethyl modified thymine with phosphorothioate linkage
  modified_base 7: mod_base = OTHER; note = 2'-O-methoxyethyl modified 5-methyl cytosine with phosphorothioate linkage
  modified_base 8: mod_base = OTHER; note = 2'-O-methoxyethyl modified nucleotide with phosphorothioate linkage
  modified_base 9: mod_base = OTHER; note = 2'-O-methoxyethyl modified thymine
  modified_base 10: mod_base = OTHER; note = 2'-O-methoxyethyl modified nucleotide with phosphorothioate linkage
  modified_base 11: mod_base = OTHER; note = 2'-O-methoxyethyl modified nucleotide with phosphorothioate linkage
  modified_base 12: mod_base = OTHER; note = 2'-O-methoxyethyl modified thymine with phosphorothioate linkage
  modified_base 13: mod_base = OTHER; note = 2'-O-methoxyethyl modified nucleotide with phosphorothioate linkage
  modified_base 14: mod_base = OTHER; note = 2'-O-methoxyethyl modified 5-methyl cytosine with phosphorothioate linkage
  modified_base 15: mod_base = OTHER; note = 2'-O-methoxyethyl modified thymine with phosphorothioate linkage
  modified_base 16: mod_base = OTHER; note = 2'-O-methoxyethyl modified nucleotide with phosphorothioate linkage
  modified_base 17: mod_base = OTHER; note = 2'-O-methoxyethyl modified nucleotide with phosphorothioate linkage
  modified_base 18: mod_base = OTHER; note = 2'-O-methoxyethyl modified 5-methyl cytosine
cactttcataatgctggc

SEQ ID NO: 96 - RNA, 18 nt, synthetic construct
  source 1..18: mol_type = other RNA
  modified_base 1: mod_base = OTHER; note = 2'-O-methoxyethyl modified 5-methyl cytosine with phosphorothioate linkage
  modified_base 2: mod_base = OTHER; note = 2'-O-methoxyethyl modified nucleotide with phosphorothioate linkage
  modified_base 3: mod_base = OTHER; note = 2'-O-methoxyethyl modified 5-methyl cytosine with phosphorothioate linkage
  modified_base 4: mod_base = OTHER; note = 2'-O-methoxyethyl modified thymine with phosphorothioate linkage
  modified_base 5: mod_base = OTHER; note = 2'-O-methoxyethyl modified thymine with phosphorothioate linkage
  modified_base 6: mod_base = OTHER; note = 2'-O-methoxyethyl modified thymine with phosphorothioate linkage
  modified_base 7: mod_base = OTHER; note = 2'-O-methoxyethyl modified 5-methyl cytosine with phosphorothioate linkage
  modified_base 8: mod_base = OTHER; note = 2'-O-methoxyethyl modified nucleotide with phosphorothioate linkage
  modified_base 9: mod_base = OTHER; note = 2'-O-methoxyethyl modified thymine with phosphorothioate linkage
  modified_base 10: mod_base = OTHER; note = 2'-O-methoxyethyl modified nucleotide with phosphorothioate linkage
  modified_base 11: mod_base = OTHER; note = 2'-O-methoxyethyl modified nucleotide
  modified_base 12: mod_base = OTHER; note = 2'-O-methoxyethyl modified thymine with phosphorothioate linkage
  modified_base 13: mod_base = OTHER; note = 2'-O-methoxyethyl modified nucleotide with phosphorothioate linkage
  modified_base 14: mod_base = OTHER; note = 2'-O-methoxyethyl modified 5-methyl cytosine with phosphorothioate linkage
  modified_base 15: mod_base = OTHER; note = 2'-O-methoxyethyl modified thymine with phosphorothioate linkage
  modified_base 16: mod_base = OTHER; note = 2'-O-methoxyethyl modified nucleotide with phosphorothioate linkage
  modified_base 17: mod_base = OTHER; note = 2'-O-methoxyethyl modified nucleotide with phosphorothioate linkage
  modified_base 18: mod_base = OTHER; note = 2'-O-methoxyethyl modified 5-methyl cytosine
cactttcataatgctggc

SEQ ID NO: 97 - RNA, 18 nt, synthetic construct
  source 1..18: mol_type = other RNA
  modified_base 1: mod_base = OTHER; note = 2'-O-methoxyethyl modified 5-methyl cytosine with phosphorothioate linkage
  modified_base 2: mod_base = OTHER; note = 2'-O-methoxyethyl modified nucleotide with phosphorothioate linkage
  modified_base 3: mod_base = OTHER; note = 2'-O-methoxyethyl modified 5-methyl cytosine with phosphorothioate linkage
  modified_base 4: mod_base = OTHER; note = 2'-O-methoxyethyl modified thymine with phosphorothioate linkage
  modified_base 5: mod_base = OTHER; note = 2'-O-methoxyethyl modified thymine with phosphorothioate linkage
  modified_base 6: mod_base = OTHER; note = 2'-O-methoxyethyl modified thymine with phosphorothioate linkage
  modified_base 7: mod_base = OTHER; note = 2'-O-methoxyethyl modified 5-methyl cytosine with phosphorothioate linkage
  modified_base 8: mod_base = OTHER; note = 2'-O-methoxyethyl modified nucleotide with phosphorothioate linkage
  modified_base 9: mod_base = OTHER; note = 2'-O-methoxyethyl modified thymine with phosphorothioate linkage
  modified_base 10: mod_base = OTHER; note = 2'-O-methoxyethyl modified nucleotide with phosphorothioate linkage
  modified_base 11: mod_base = OTHER; note = 2'-O-methoxyethyl modified nucleotide with phosphorothioate linkage
  modified_base 12: mod_base = OTHER; note = 2'-O-methoxyethyl modified thymine with phosphorothioate linkage
  modified_base 13: mod_base = OTHER; note = 2'-O-methoxyethyl modified nucleotide
  modified_base 14: mod_base = OTHER; note = 2'-O-methoxyethyl modified 5-methyl cytosine with phosphorothioate linkage
  modified_base 15: mod_base = OTHER; note = 2'-O-methoxyethyl modified thymine with phosphorothioate linkage
  modified_base 16: mod_base = OTHER; note = 2'-O-methoxyethyl modified nucleotide with phosphorothioate linkage
  modified_base 17: mod_base = OTHER; note = 2'-O-methoxyethyl modified nucleotide with phosphorothioate linkage
  modified_base 18: mod_base = OTHER; note = 2'-O-methoxyethyl modified 5-methyl cytosine
cactttcataatgctggc

SEQ ID NO: 98 - RNA, 18 nt, synthetic construct
  source 1..18: mol_type = other RNA
  modified_base 1: mod_base = OTHER; note = 2'-O-methoxyethyl modified 5-methyl cytosine with phosphorothioate linkage
  modified_base 2: mod_base = OTHER; note = 2'-O-methoxyethyl modified nucleotide with phosphorothioate linkage
  modified_base 3: mod_base = OTHER; note = 2'-O-methoxyethyl modified 5-methyl cytosine with phosphorothioate linkage
  modified_base 4: mod_base = OTHER; note = 2'-O-methoxyethyl modified thymine with phosphorothioate linkage
  modified_base 5: mod_base = OTHER; note = 2'-O-methoxyethyl modified thymine with phosphorothioate linkage
  modified_base 6: mod_base = OTHER; note = 2'-O-methoxyethyl modified thymine with phosphorothioate linkage
  modified_base 7: mod_base = OTHER; note = 2'-O-methoxyethyl modified 5-methyl cytosine with phosphorothioate linkage
  modified_base 8: mod_base = OTHER; note = 2'-O-methoxyethyl modified nucleotide with phosphorothioate linkage
  modified_base 9: mod_base = OTHER; note = 2'-O-methoxyethyl modified thymine with phosphorothioate linkage
  modified_base 10: mod_base = OTHER; note = 2'-O-methoxyethyl modified nucleotide with phosphorothioate linkage
  modified_base 11: mod_base = OTHER; note = 2'-O-methoxyethyl modified nucleotide with phosphorothioate linkage
  modified_base 12: mod_base = OTHER; note = 2'-O-methoxyethyl modified thymine with phosphorothioate linkage
  modified_base 13: mod_base = OTHER; note = 2'-O-methoxyethyl modified nucleotide with phosphorothioate linkage
  modified_base 14: mod_base = OTHER; note = 2'-O-methoxyethyl modified 5-methyl cytosine with phosphorothioate linkage
  modified_base 15: mod_base = OTHER; note = 2'-O-methoxyethyl modified thymine
  modified_base 16: mod_base = OTHER; note = 2'-O-methoxyethyl modified nucleotide with phosphorothioate linkage
  modified_base 17: mod_base = OTHER; note = 2'-O-methoxyethyl modified nucleotide with phosphorothioate linkage
  modified_base 18: mod_base = OTHER; note = 2'-O-methoxyethyl modified 5-methyl cytosine
cactttcataatgctggc

SEQ ID NO: 99 - RNA, 18 nt, synthetic construct
  source 1..18: mol_type = other RNA
  modified_base 1: mod_base = OTHER; note = 2'-O-methoxyethyl modified 5-methyl cytosine with phosphorothioate linkage
  modified_base 2: mod_base = OTHER; note = 2'-O-methoxyethyl modified nucleotide with phosphorothioate linkage
  modified_base 3: mod_base = OTHER; note = 2'-O-methoxyethyl modified 5-methyl cytosine
  modified_base 4: mod_base = OTHER; note = 2'-O-methoxyethyl modified thymine with phosphorothioate linkage
  modified_base 5: mod_base = OTHER; note = 2'-O-methoxyethyl modified thymine with phosphorothioate linkage
  modified_base 6: mod_base = OTHER; note = 2'-O-methoxyethyl modified thymine with phosphorothioate linkage
  modified_base 7: mod_base = OTHER; note = 2'-O-methoxyethyl modified 5-methyl cytosine with phosphorothioate linkage
  modified_base 8: mod_base = OTHER; note = 2'-O-methoxyethyl modified nucleotide with phosphorothioate linkage
  modified_base 9: mod_base = OTHER; note = 2'-O-methoxyethyl modified thymine with phosphorothioate linkage
  modified_base 10: mod_base = OTHER; note = 2'-O-methoxyethyl modified nucleotide with phosphorothioate linkage
  modified_base 11: mod_base = OTHER; note = 2'-O-methoxyethyl modified nucleotide with phosphorothioate linkage
  modified_base 12: mod_base = OTHER; note = 2'-O-methoxyethyl modified thymine with phosphorothioate linkage
  modified_base 13: mod_base = OTHER; note = 2'-O-methoxyethyl modified nucleotide with phosphorothioate linkage
  modified_base 14: mod_base = OTHER; note = 2'-O-methoxyethyl modified 5-methyl cytosine with phosphorothioate linkage
  modified_base 15: mod_base = OTHER; note = 2'-O-methoxyethyl modified thymine
  modified_base 16: mod_base = OTHER; note = 2'-O-methoxyethyl modified nucleotide with phosphorothioate linkage
  modified_base 17: mod_base = OTHER; note = 2'-O-methoxyethyl modified nucleotide with phosphorothioate linkage
  modified_base 18: mod_base = OTHER; note = 2'-O-methoxyethyl modified 5-methyl cytosine
cactttcataatgctggc

SEQ ID NO: 100 - RNA, 18 nt, synthetic construct
  source 1..18: mol_type = other RNA
  modified_base 1: mod_base = OTHER; note = 2'-O-methoxyethyl modified 5-methyl cytosine with phosphorothioate linkage
  modified_base 2: mod_base = OTHER; note = 2'-O-methoxyethyl modified nucleotide
  modified_base 3: mod_base = OTHER; note = 2'-O-methoxyethyl modified 5-methyl cytosine with phosphorothioate linkage
  modified_base 4: mod_base = OTHER; note = 2'-O-methoxyethyl modified thymine with phosphorothioate linkage
  modified_base 5: mod_base = OTHER; note = 2'-O-methoxyethyl modified thymine with phosphorothioate linkage
  modified_base 6: mod_base = OTHER; note = 2'-O-methoxyethyl modified thymine with phosphorothioate linkage
  modified_base 7: mod_base = OTHER; note = 2'-O-methoxyethyl modified 5-methyl cytosine with phosphorothioate linkage
  modified_base 8: mod_base = OTHER; note = 2'-O-methoxyethyl modified nucleotide with phosphorothioate linkage
  modified_base 9: mod_base = OTHER; note = 2'-O-methoxyethyl modified thymine with phosphorothioate linkage
  modified_base 10: mod_base = OTHER; note = 2'-O-methoxyethyl modified nucleotide with phosphorothioate linkage
  modified_base 11: mod_base = OTHER; note = 2'-O-methoxyethyl modified nucleotide with phosphorothioate linkage
  modified_base 12: mod_base = OTHER; note = 2'-O-methoxyethyl modified thymine with phosphorothioate linkage
  modified_base 13: mod_base = OTHER; note = 2'-O-methoxyethyl modified nucleotide with phosphorothioate linkage
  modified_base 14: mod_base = OTHER; note = 2'-O-methoxyethyl modified 5-methyl cytosine with phosphorothioate linkage
  modified_base 15: mod_base = OTHER; note = 2'-O-methoxyethyl modified thymine
  modified_base 16: mod_base = OTHER; note = 2'-O-methoxyethyl modified nucleotide with phosphorothioate linkage
  modified_base 17: mod_base = OTHER; note = 2'-O-methoxyethyl modified nucleotide with phosphorothioate linkage
  modified_base 18: mod_base = OTHER; note = 2'-O-methoxyethyl modified 5-methyl cytosine
cactttcataatgctggc

SEQ ID NO: 101 - RNA, 18 nt, synthetic construct
  source 1..18: mol_type = other RNA
  modified_base 1: mod_base = OTHER; note = 2'-O-methoxyethyl modified 5-methyl cytosine with phosphorothioate linkage
  modified_base 2: mod_base = OTHER; note = 2'-O-methoxyethyl modified nucleotide
  modified_base 3: mod_base = OTHER; note = 2'-O-methoxyethyl modified 5-methyl cytosine with phosphorothioate linkage
  modified_base 4: mod_base = OTHER; note = 2'-O-methoxyethyl modified thymine with phosphorothioate linkage
  modified_base 5: mod_base = OTHER; note = 2'-O-methoxyethyl modified thymine with phosphorothioate linkage
  modified_base 6: mod_base = OTHER; note = 2'-O-methoxyethyl modified thymine with phosphorothioate linkage
  modified_base 7: mod_base = OTHER; note = 2'-O-methoxyethyl modified 5-methyl cytosine with phosphorothioate linkage
  modified_base 8: mod_base = OTHER; note = 2'-O-methoxyethyl modified nucleotide with phosphorothioate linkage
  modified_base 9: mod_base = OTHER; note = 2'-O-methoxyethyl modified thymine with phosphorothioate linkage
  modified_base 10: mod_base = OTHER; note = 2'-O-methoxyethyl modified nucleotide with phosphorothioate linkage
  modified_base 11: mod_base = OTHER; note = 2'-O-methoxyethyl modified nucleotide with phosphorothioate linkage
  modified_base 12: mod_base = OTHER; note = 2'-O-methoxyethyl modified thymine
  modified_base 13: mod_base = OTHER; note = 2'-O-methoxyethyl modified nucleotide with phosphorothioate linkage
  modified_base 14: mod_base = OTHER; note = 2'-O-methoxyethyl modified 5-methyl cytosine with phosphorothioate linkage
  modified_base 15: mod_base = OTHER; note = 2'-O-methoxyethyl modified thymine with phosphorothioate linkage
  modified_base 16: mod_base = OTHER; note = 2'-O-methoxyethyl modified nucleotide with phosphorothioate linkage
  modified_base 17: mod_base = OTHER; note = 2'-O-methoxyethyl modified nucleotide with phosphorothioate linkage
  modified_base 18: mod_base = OTHER; note = 2'-O-methoxyethyl modified 5-methyl cytosine
cactttcataatgctggc

SEQ ID NO: 102 - RNA, 18 nt, synthetic construct
  source 1..18: mol_type = other RNA
  modified_base 1: mod_base = OTHER; note = 2'-O-methoxyethyl modified 5-methyl cytosine with phosphorothioate linkage
  modified_base 2: mod_base = OTHER; note = 2'-O-methoxyethyl modified nucleotide
  modified_base 3: mod_base = OTHER; note = 2'-O-methoxyethyl modified 5-methyl cytosine with phosphorothioate linkage
  modified_base 4: mod_base = OTHER; note = 2'-O-methoxyethyl modified thymine with phosphorothioate linkage
  modified_base 5: mod_base = OTHER; note = 2'-O-methoxyethyl modified thymine with phosphorothioate linkage
  modified_base 6: mod_base = OTHER; note = 2'-O-methoxyethyl modified thymine with phosphorothioate linkage
  modified_base 7: mod_base = OTHER; note = 2'-O-methoxyethyl modified 5-methyl cytosine with phosphorothioate linkage
  modified_base 8: mod_base = OTHER; note = 2'-O-methoxyethyl modified nucleotide with phosphorothioate linkage
  modified_base 9: mod_base = OTHER; note = 2'-O-methoxyethyl modified thymine with phosphorothioate linkage
  modified_base 10: mod_base = OTHER; note = 2'-O-methoxyethyl modified nucleotide
  modified_base 11: mod_base = OTHER; note = 2'-O-methoxyethyl modified nucleotide with phosphorothioate linkage
  modified_base 12: mod_base = OTHER; note = 2'-O-methoxyethyl modified thymine with phosphorothioate linkage
  modified_base 13: mod_base = OTHER; note = 2'-O-methoxyethyl modified nucleotide with phosphorothioate linkage
  modified_base 14: mod_base = OTHER; note = 2'-O-methoxyethyl modified 5-methyl cytosine with phosphorothioate linkage
  modified_base 15: mod_base = OTHER; note = 2'-O-methoxyethyl modified thymine with phosphorothioate linkage
  modified_base 16: mod_base = OTHER; note = 2'-O-methoxyethyl modified nucleotide with phosphorothioate linkage
  modified_base 17: mod_base = OTHER; note = 2'-O-methoxyethyl modified nucleotide with phosphorothioate linkage
  modified_base 18: mod_base = OTHER; note = 2'-O-methoxyethyl modified 5-methyl cytosine
cactttcataatgctggc

SEQ ID NO: 103 - RNA, 18 nt, synthetic construct
  source 1..18: mol_type = other RNA
  modified_base 1: mod_base = OTHER; note = 2'-O-methoxyethyl modified 5-methyl cytosine with phosphorothioate linkage
  modified_base 2: mod_base = OTHER; note = 2'-O-methoxyethyl modified nucleotide
  modified_base 3: mod_base = OTHER; note = 2'-O-methoxyethyl modified 5-methyl cytosine with phosphorothioate linkage
  modified_base 4: mod_base = OTHER; note = 2'-O-methoxyethyl modified thymine with phosphorothioate linkage
  modified_base 5: mod_base = OTHER; note = 2'-O-methoxyethyl modified thymine with phosphorothioate linkage
  modified_base 6: mod_base = OTHER; note = 2'-O-methoxyethyl modified thymine with phosphorothioate linkage
  modified_base 7: mod_base = OTHER; note = 2'-O-methoxyethyl modified 5-methyl cytosine with phosphorothioate linkage
  modified_base 8: mod_base = OTHER; note = 2'-O-methoxyethyl modified nucleotide
  modified_base 9: mod_base = OTHER; note = 2'-O-methoxyethyl modified thymine with phosphorothioate linkage
  modified_base 10: mod_base = OTHER; note = 2'-O-methoxyethyl modified nucleotide with phosphorothioate linkage
  modified_base 11: mod_base = OTHER; note = 2'-O-methoxyethyl modified nucleotide with phosphorothioate linkage
  modified_base 12: mod_base = OTHER; note = 2'-O-methoxyethyl modified thymine with phosphorothioate linkage
  modified_base 13: mod_base = OTHER; note = 2'-O-methoxyethyl modified nucleotide with phosphorothioate linkage
  modified_base 14: mod_base = OTHER; note = 2'-O-methoxyethyl modified 5-methyl cytosine with phosphorothioate linkage
  modified_base 15: mod_base = OTHER; note = 2'-O-methoxyethyl modified thymine with phosphorothioate linkage
  modified_base 16: mod_base = OTHER; note = 2'-O-methoxyethyl modified nucleotide with phosphorothioate linkage
  modified_base 17: mod_base = OTHER; note = 2'-O-methoxyethyl modified nucleotide with phosphorothioate linkage
  modified_base 18: mod_base = OTHER; note = 2'-O-methoxyethyl modified 5-methyl cytosine
cactttcataatgctggc

SEQ ID NO: 104 - RNA, 18 nt, synthetic construct
  source 1..18: mol_type = other RNA
  modified_base 1: mod_base = OTHER; note = 2'-O-methoxyethyl modified 5-methyl cytosine with phosphorothioate linkage
  modified_base 2: mod_base = OTHER; note = 2'-O-methoxyethyl modified nucleotide
  modified_base 3: mod_base = OTHER; note = 2'-O-methoxyethyl modified 5-methyl cytosine with phosphorothioate linkage
  modified_base 4: mod_base = OTHER; note = 2'-O-methoxyethyl modified thymine with phosphorothioate linkage
  modified_base 5: mod_base = OTHER; note = 2'-O-methoxyethyl modified thymine with phosphorothioate linkage
  modified_base 6: mod_base = OTHER; note = 2'-O-methoxyethyl modified thymine
  modified_base 7: mod_base = OTHER; note = 2'-O-methoxyethyl modified 5-methyl cytosine with phosphorothioate linkage
  modified_base 8: mod_base = OTHER; note = 2'-O-methoxyethyl modified nucleotide with phosphorothioate linkage
  modified_base 9: mod_base = OTHER; note = 2'-O-methoxyethyl modified thymine with phosphorothioate linkage
  modified_base 10: mod_base = OTHER; note = 2'-O-methoxyethyl modified nucleotide with phosphorothioate linkage
  modified_base 11: mod_base = OTHER; note = 2'-O-methoxyethyl modified nucleotide with phosphorothioate linkage
  modified_base 12: mod_base = OTHER; note = 2'-O-methoxyethyl modified thymine with phosphorothioate linkage
  modified_base 13: mod_base = OTHER; note = 2'-O-methoxyethyl modified nucleotide with phosphorothioate linkage
  modified_base 14: mod_base = OTHER; note = 2'-O-methoxyethyl modified 5-methyl cytosine with phosphorothioate linkage
  modified_base 15: mod_base = OTHER; note = 2'-O-methoxyethyl modified thymine with phosphorothioate linkage
  modified_base 16: mod_base = OTHER; note = 2'-O-methoxyethyl modified nucleotide with phosphorothioate linkage
  modified_base 17: mod_base = OTHER; note = 2'-O-methoxyethyl modified nucleotide with phosphorothioate linkage
  modified_base 18: mod_base = OTHER; note = 2'-O-methoxyethyl modified 5-methyl cytosine
cactttcataatgctggc

SEQ ID NO: 105 - RNA, 18 nt, synthetic construct
  source 1..18: mol_type = other RNA
  modified_base 1: mod_base = OTHER; note = 2'-O-methoxyethyl modified 5-methyl cytosine with phosphorothioate linkage
  modified_base 2: mod_base = OTHER; note = 2'-O-methoxyethyl modified nucleotide with phosphorothioate linkage
  modified_base 3: mod_base = OTHER; note = 2'-O-methoxyethyl modified 5-methyl cytosine with phosphorothioate linkage
  modified_base 4: mod_base = OTHER; note = 2'-O-methoxyethyl modified thymine with phosphorothioate linkage
  modified_base 5: mod_base = OTHER; note = 2'-O-methoxyethyl modified thymine
  modified_base 6: mod_base = OTHER; note = 2'-O-methoxyethyl modified thymine with phosphorothioate linkage
  modified_base 7: mod_base = OTHER; note = 2'-O-methoxyethyl modified 5-methyl cytosine with phosphorothioate linkage
  modified_base 8: mod_base = OTHER; note = 2'-O-methoxyethyl modified nucleotide with phosphorothioate linkage
  modified_base 9: mod_base = OTHER; note = 2'-O-methoxyethyl modified thymine with phosphorothioate linkage
  modified_base 10: mod_base = OTHER; note = 2'-O-methoxyethyl modified nucleotide with phosphorothioate linkage
  modified_base 11: mod_base = OTHER; note = 2'-O-methoxyethyl modified nucleotide with phosphorothioate linkage
  modified_base 12: mod_base = OTHER; note = 2'-O-methoxyethyl modified thymine with phosphorothioate linkage
  modified_base 13: mod_base = OTHER; note = 2'-O-methoxyethyl modified nucleotide with phosphorothioate linkage
  modified_base 14: mod_base = OTHER; note = 2'-O-methoxyethyl modified 5-methyl cytosine with phosphorothioate linkage
  modified_base 15: mod_base = OTHER; note = 2'-O-methoxyethyl modified thymine
  modified_base 16: mod_base = OTHER; note = 2'-O-methoxyethyl modified nucleotide with phosphorothioate linkage
  modified_base 17: mod_base = OTHER; note = 2'-O-methoxyethyl modified nucleotide with phosphorothioate linkage
  modified_base 18: mod_base = OTHER; note = 2'-O-methoxyethyl modified 5-methyl cytosine
cactttcataatgctggc

SEQ ID NO: 106 - RNA, 18 nt, synthetic construct
  source 1..18: mol_type = other RNA
  modified_base 1: mod_base = OTHER; note = 2'-O-methoxyethyl modified 5-methyl cytosine with phosphorothioate linkage
  modified_base 2: mod_base = OTHER; note = 2'-O-methoxyethyl modified nucleotide with phosphorothioate linkage
  modified_base 3: mod_base = OTHER; note = 2'-O-methoxyethyl modified 5-methyl cytosine with phosphorothioate linkage
  modified_base 4: mod_base = OTHER; note = 2'-O-methoxyethyl modified thymine with phosphorothioate linkage
  modified_base 5: mod_base = OTHER; note = 2'-O-methoxyethyl modified thymine with phosphorothioate linkage
  modified_base 6: mod_base = OTHER; note = 2'-O-methoxyethyl modified thymine with phosphorothioate linkage
  modified_base 7: mod_base = OTHER; note = 2'-O-methoxyethyl modified 5-methyl cytosine
  modified_base 8: mod_base = OTHER; note = 2'-O-methoxyethyl modified nucleotide with phosphorothioate linkage
  modified_base 9: mod_base = OTHER; note = 2'-O-methoxyethyl modified thymine with phosphorothioate linkage
  modified_base 10: mod_base = OTHER; note = 2'-O-methoxyethyl modified nucleotide with phosphorothioate linkage
  modified_base 11: mod_base = OTHER; note = 2'-O-methoxyethyl modified nucleotide with phosphorothioate linkage
  modified_base 12: mod_base = OTHER; note = 2'-O-methoxyethyl modified thymine with phosphorothioate linkage
  modified_base 13: mod_base = OTHER; note = 2'-O-methoxyethyl modified nucleotide with phosphorothioate linkage
  modified_base 14: mod_base = OTHER; note = 2'-O-methoxyethyl modified 5-methyl cytosine with phosphorothioate linkage
  modified_base 15: mod_base = OTHER; note = 2'-O-methoxyethyl modified thymine
  modified_base 16: mod_base = OTHER; note = 2'-O-methoxyethyl modified nucleotide with phosphorothioate linkage
  modified_base 17: mod_base = OTHER; note = 2'-O-methoxyethyl modified nucleotide with phosphorothioate linkage
  modified_base 18: mod_base = OTHER; note = 2'-O-methoxyethyl modified 5-methyl cytosine
cactttcataatgctggc

SEQ ID NO: 107 - RNA, 18 nt, synthetic construct
  source 1..18: mol_type = other RNA
  modified_base 1: mod_base = OTHER; note = 2'-O-methoxyethyl modified 5-methyl cytosine with phosphorothioate linkage
  modified_base 2: mod_base = OTHER; note = 2'-O-methoxyethyl modified nucleotide with phosphorothioate linkage
  modified_base 3: mod_base = OTHER; note = 2'-O-methoxyethyl modified 5-methyl cytosine with phosphorothioate linkage
  modified_base 4: mod_base = OTHER; note = 2'-O-methoxyethyl modified thymine with phosphorothioate linkage
  modified_base 5: mod_base = OTHER; note = 2'-O-methoxyethyl modified thymine with phosphorothioate linkage
  modified_base 6: mod_base = OTHER; note = 2'-O-methoxyethyl modified thymine with phosphorothioate linkage
  modified_base 7: mod_base = OTHER; note = 2'-O-methoxyethyl modified 5-methyl cytosine with phosphorothioate linkage
  modified_base 8: mod_base = OTHER; note = 2'-O-methoxyethyl modified nucleotide with phosphorothioate linkage
  modified_base 9: mod_base = OTHER; note = 2'-O-methoxyethyl modified thymine
  modified_base 10: mod_base = OTHER; note = 2'-O-methoxyethyl modified nucleotide with phosphorothioate linkage
  modified_base 11: mod_base = OTHER; note = 2'-O-methoxyethyl modified nucleotide with phosphorothioate linkage
  modified_base 12: mod_base = OTHER; note = 2'-O-methoxyethyl modified thymine with phosphorothioate linkage
  modified_base 13: mod_base = OTHER; note = 2'-O-methoxyethyl modified nucleotide with phosphorothioate linkage
  modified_base 14: mod_base = OTHER; note = 2'-O-methoxyethyl modified 5-methyl cytosine with phosphorothioate linkage
  modified_base 15: mod_base = OTHER; note = 2'-O-methoxyethyl modified thymine
  modified_base 16: mod_base = OTHER; note = 2'-O-methoxyethyl modified nucleotide with phosphorothioate linkage
  modified_base 17: mod_base = OTHER; note = 2'-O-methoxyethyl modified nucleotide with phosphorothioate linkage
  modified_base 18: mod_base = OTHER; note = 2'-O-methoxyethyl modified 5-methyl cytosine
cactttcataatgctggc

SEQ ID NO: 108 - RNA, 18 nt, synthetic construct
  source 1..18: mol_type = other RNA
  modified_base 1: mod_base = OTHER; note = 2'-O-methoxyethyl modified 5-methyl cytosine with phosphorothioate linkage
  modified_base 2: mod_base = OTHER; note = 2'-O-methoxyethyl modified nucleotide with phosphorothioate linkage
  modified_base 3: mod_base = OTHER; note = 2'-O-methoxyethyl modified 5-methyl cytosine with phosphorothioate linkage
  modified_base 4: mod_base = OTHER; note = 2'-O-methoxyethyl modified thymine with phosphorothioate linkage
  modified_base 5: mod_base = OTHER; note = 2'-O-methoxyethyl modified thymine with phosphorothioate linkage
  modified_base 6: mod_base = OTHER; note = 2'-O-methoxyethyl modified thymine with phosphorothioate linkage
  modified_base 7: mod_base = OTHER; note = 2'-O-methoxyethyl modified 5-methyl cytosine with phosphorothioate linkage
  modified_base 8: mod_base = OTHER; note = 2'-O-methoxyethyl modified nucleotide with phosphorothioate linkage
  modified_base 9: mod_base = OTHER; note = 2'-O-methoxyethyl modified thymine with phosphorothioate linkage
  modified_base 10: mod_base = OTHER; note = 2'-O-methoxyethyl modified nucleotide with phosphorothioate linkage
  modified_base 11: mod_base = OTHER; note = 2'-O-methoxyethyl modified nucleotide
  modified_base 12: mod_base = OTHER; note = 2'-O-methoxyethyl modified thymine with phosphorothioate linkage
  modified_base 13: mod_base = OTHER; note = 2'-O-methoxyethyl modified nucleotide with phosphorothioate linkage
  modified_base 14: mod_base = OTHER; note = 2'-O-methoxyethyl modified 5-methyl cytosine with phosphorothioate linkage
  modified_base 15: mod_base = OTHER; note = 2'-O-methoxyethyl modified thymine
  modified_base 16: mod_base = OTHER; note = 2'-O-methoxyethyl modified nucleotide with phosphorothioate linkage
  modified_base 17: mod_base = OTHER; note = 2'-O-methoxyethyl modified nucleotide with phosphorothioate linkage
  modified_base 18: mod_base = OTHER; note = 2'-O-methoxyethyl modified 5-methyl cytosine
cactttcataatgctggc

SEQ ID NO: 109 - RNA, 18 nt, synthetic construct
  source 1..18: mol_type = other RNA
  modified_base 1: mod_base = OTHER; note = 2'-O-methoxyethyl modified 5-methyl cytosine with phosphorothioate linkage
  modified_base 2: mod_base = OTHER; note = 2'-O-methoxyethyl modified nucleotide with phosphorothioate linkage
  modified_base 3: mod_base = OTHER; note = 2'-O-methoxyethyl modified 5-methyl cytosine with phosphorothioate linkage
  modified_base 4: mod_base = OTHER; note = 2'-O-methoxyethyl modified thymine with phosphorothioate linkage
  modified_base 5: mod_base = OTHER; note = 2'-O-methoxyethyl modified thymine with phosphorothioate linkage
  modified_base 6: mod_base = OTHER; note = 2'-O-methoxyethyl modified thymine with phosphorothioate linkage
  modified_base 7: mod_base = OTHER; note = 2'-O-methoxyethyl modified 5-methyl cytosine with phosphorothioate linkage
  modified_base 8: mod_base = OTHER; note = 2'-O-methoxyethyl modified nucleotide with phosphorothioate linkage
  modified_base 9: mod_base = OTHER; note = 2'-O-methoxyethyl modified thymine with phosphorothioate linkage
  modified_base 10: mod_base = OTHER; note = 2'-O-methoxyethyl modified nucleotide with phosphorothioate linkage
  modified_base 11: mod_base = OTHER; note = 2'-O-methoxyethyl modified nucleotide with phosphorothioate linkage
  modified_base 12: mod_base = OTHER; note = 2'-O-methoxyethyl modified thymine with phosphorothioate linkage
  modified_base 13: mod_base = OTHER; note = 2'-O-methoxyethyl modified nucleotide
  modified_base 14: mod_base = OTHER; note = 2'-O-methoxyethyl modified 5-methyl cytosine with phosphorothioate linkage
  modified_base 15: mod_base = OTHER; note = 2'-O-methoxyethyl modified thymine
  modified_base 16: mod_base = OTHER; note = 2'-O-methoxyethyl modified nucleotide with phosphorothioate linkage
  modified_base 17: mod_base = OTHER; note = 2'-O-methoxyethyl modified nucleotide with phosphorothioate linkage
  modified_base 18: mod_base = OTHER; note = 2'-O-methoxyethyl modified 5-methyl cytosine
cactttcataatgctggc

SEQ ID NO: 110 - RNA, 18 nt, synthetic construct
  source 1..18: mol_type = other RNA
  modified_base 1: mod_base = OTHER; note = 2'-O-methoxyethyl modified 5-methyl cytosine with phosphorothioate linkage
  modified_base 2: mod_base = OTHER; note = 2'-O-methoxyethyl modified nucleotide
  modified_base 3: mod_base = OTHER; note = 2'-O-methoxyethyl modified 5-methyl cytosine
  modified_base 4: mod_base = OTHER; note = 2'-O-methoxyethyl modified thymine with phosphorothioate linkage
  modified_base 5: mod_base = OTHER; note = 2'-O-methoxyethyl modified thymine with phosphorothioate linkage
  modified_base 6: mod_base = OTHER; note = 2'-O-methoxyethyl modified thymine with phosphorothioate linkage
  modified_base 7: mod_base = OTHER; note = 2'-O-methoxyethyl modified 5-methyl cytosine with phosphorothioate linkage
  modified_base 8: mod_base = OTHER; note = 2'-O-methoxyethyl modified nucleotide with phosphorothioate linkage
  modified_base 9: mod_base = OTHER; note = 2'-O-methoxyethyl modified thymine with phosphorothioate linkage
  modified_base 10: mod_base = OTHER; note = 2'-O-methoxyethyl modified nucleotide with phosphorothioate linkage
  modified_base 11: mod_base = OTHER; note = 2'-O-methoxyethyl modified nucleotide with phosphorothioate linkage
  modified_base 12: mod_base = OTHER; note = 2'-O-methoxyethyl modified thymine with phosphorothioate linkage
  modified_base 13: mod_base = OTHER; note = 2'-O-methoxyethyl modified nucleotide with phosphorothioate linkage
  modified_base 14: mod_base = OTHER; note = 2'-O-methoxyethyl modified 5-methyl cytosine with phosphorothioate linkage
  modified_base 15: mod_base = OTHER; note = 2'-O-methoxyethyl modified thymine with phosphorothioate linkage
  modified_base 16: mod_base = OTHER; note = 2'-O-methoxyethyl modified nucleotide with phosphorothioate linkage
  modified_base 17: mod_base = OTHER; note = 2'-O-methoxyethyl modified nucleotide with phosphorothioate linkage
  modified_base 18: mod_base = OTHER; note = 2'-O-methoxyethyl modified 5-methyl cytosine
cactttcataatgctggc

SEQ ID NO: 111 - RNA, 18 nt, synthetic construct
  source 1..18: mol_type = other RNA
  modified_base 1: mod_base = OTHER; note = 2'-O-methoxyethyl modified 5-methyl cytosine with phosphorothioate linkage
  modified_base 2: mod_base = OTHER; note = 2'-O-methoxyethyl modified nucleotide with phosphorothioate linkage
  modified_base 3: mod_base = OTHER; note = 2'-O-methoxyethyl modified 5-methyl cytosine with phosphorothioate linkage
  modified_base 4: mod_base = OTHER; note = 2'-O-methoxyethyl modified thymine
  modified_base 5: mod_base = OTHER; note = 2'-O-methoxyethyl modified thymine
  modified_base 6: mod_base = OTHER; note = 2'-O-methoxyethyl modified thymine with phosphorothioate linkage
  modified_base 7: mod_base = OTHER; note = 2'-O-methoxyethyl modified 5-methyl cytosine with phosphorothioate linkage
  modified_base 8: mod_base = OTHER; note = 2'-O-methoxyethyl modified nucleotide with phosphorothioate linkage
  modified_base 9: mod_base = OTHER; note = 2'-O-methoxyethyl modified thymine with phosphorothioate linkage
  modified_base 10: mod_base = OTHER; note = 2'-O-methoxyethyl modified nucleotide with phosphorothioate linkage
  modified_base 11: mod_base = OTHER; note = 2'-O-methoxyethyl modified nucleotide with phosphorothioate linkage
  modified_base 12: mod_base = OTHER; note = 2'-O-methoxyethyl modified thymine with phosphorothioate linkage
  modified_base 13: mod_base = OTHER; note = 2'-O-methoxyethyl modified nucleotide with phosphorothioate linkage
  modified_base 14: mod_base = OTHER; note = 2'-O-methoxyethyl modified 5-methyl cytosine with phosphorothioate linkage
  modified_base 15: mod_base = OTHER; note = 2'-O-methoxyethyl modified thymine with phosphorothioate linkage
  modified_base 16: mod_base = OTHER; note = 2'-O-methoxyethyl modified nucleotide with phosphorothioate linkage
  modified_base 17: mod_base = OTHER; note = 2'-O-methoxyethyl modified nucleotide with phosphorothioate linkage
  modified_base 18: mod_base = OTHER; note = 2'-O-methoxyethyl modified 5-methyl cytosine
cactttcataatgctggc

SEQ ID NO: 112 - RNA, 18 nt, synthetic construct
  source 1..18: mol_type = other RNA
  modified_base 1: mod_base = OTHER; note = 2'-O-methoxyethyl modified 5-methyl cytosine with phosphorothioate linkage
  modified_base 2: mod_base = OTHER; note = 2'-O-methoxyethyl modified nucleotide with phosphorothioate linkage
  modified_base 3: mod_base = OTHER; note = 2'-O-methoxyethyl modified 5-methyl cytosine with phosphorothioate linkage
  modified_base 4: mod_base = OTHER; note = 2'-O-methoxyethyl modified thymine with phosphorothioate linkage
  modified_base 5: mod_base = OTHER; note = 2'-O-methoxyethyl modified thymine with phosphorothioate linkage
  modified_base 6: mod_base = OTHER; note = 2'-O-methoxyethyl modified thymine
  modified_base 7: mod_base = OTHER; note = 2'-O-methoxyethyl modified 5-methyl cytosine
  modified_base 8: mod_base = OTHER; note = 2'-O-methoxyethyl modified nucleotide with phosphorothioate linkage
  modified_base 9: mod_base = OTHER; note = 2'-O-methoxyethyl modified thymine with phosphorothioate linkage
  modified_base 10: mod_base = OTHER; note = 2'-O-methoxyethyl modified nucleotide with phosphorothioate linkage
  modified_base 11: mod_base = OTHER; note = 2'-O-methoxyethyl modified nucleotide with phosphorothioate linkage
  modified_base 12: mod_base = OTHER; note = 2'-O-methoxyethyl modified thymine with phosphorothioate linkage
  modified_base 13: mod_base = OTHER; note = 2'-O-methoxyethyl modified nucleotide with phosphorothioate linkage
  modified_base 14: mod_base = OTHER; note = 2'-O-methoxyethyl modified 5-methyl cytosine with phosphorothioate linkage
  modified_base 15: mod_base = OTHER; note = 2'-O-methoxyethyl modified thymine with phosphorothioate linkage
  modified_base 16: mod_base = OTHER; note = 2'-O-methoxyethyl modified nucleotide with phosphorothioate linkage
  modified_base 17: mod_base = OTHER; note = 2'-O-methoxyethyl modified nucleotide with phosphorothioate linkage
  modified_base 18: mod_base = OTHER; note = 2'-O-methoxyethyl modified 5-methyl cytosine
cactttcataatgctggc

SEQ ID NO: 113 - RNA, 18 nt, synthetic construct
  source 1..18: mol_type = other RNA
  modified_base 1: mod_base = OTHER; note = 2'-O-methoxyethyl modified 5-methyl cytosine with phosphorothioate linkage
  modified_base 2: mod_base = OTHER; note = 2'-O-methoxyethyl modified nucleotide with phosphorothioate linkage
  modified_base 3: mod_base = OTHER; note = 2'-O-methoxyethyl modified 5-methyl cytosine with phosphorothioate linkage
  modified_base 4: mod_base = OTHER; note = 2'-O-methoxyethyl modified thymine with phosphorothioate linkage
  modified_base 5: mod_base = OTHER; note = 2'-O-methoxyethyl modified thymine with phosphorothioate linkage
  modified_base 6: mod_base = OTHER; note = 2'-O-methoxyethyl modified thymine with phosphorothioate linkage
  modified_base 7: mod_base = OTHER; note = 2'-O-methoxyethyl modified 5-methyl cytosine with phosphorothioate linkage
  modified_base 8: mod_base = OTHER; note = 2'-O-methoxyethyl modified nucleotide
  modified_base 9: mod_base = OTHER; note = 2'-O-methoxyethyl modified thymine
  modified_base 10: mod_base = OTHER; note = 2'-O-methoxyethyl modified nucleotide with phosphorothioate linkage
  modified_base 11: mod_base = OTHER; note = 2'-O-methoxyethyl modified nucleotide with phosphorothioate linkage
  modified_base 12: mod_base = OTHER; note = 2'-O-methoxyethyl modified thymine with phosphorothioate linkage
  modified_base 13: mod_base = OTHER; note = 2'-O-methoxyethyl modified nucleotide with phosphorothioate linkage
  modified_base 14: mod_base = OTHER; note = 2'-O-methoxyethyl modified 5-methyl cytosine with phosphorothioate linkage
  modified_base 15: mod_base = OTHER; note = 2'-O-methoxyethyl modified thymine with phosphorothioate linkage
  modified_base 16: mod_base = OTHER; note = 2'-O-methoxyethyl modified nucleotide with phosphorothioate linkage
  modified_base 17: mod_base = OTHER; note = 2'-O-methoxyethyl modified nucleotide with phosphorothioate linkage
  modified_base 18: mod_base = OTHER; note = 2'-O-methoxyethyl modified 5-methyl cytosine
cactttcataatgctggc

SEQ ID NO: 114 - RNA, 18 nt, synthetic construct
  source 1..18: mol_type = other RNA
  modified_base 1: mod_base = OTHER; note = 2'-O-methoxyethyl modified 5-methyl cytosine with phosphorothioate linkage
  modified_base 2: mod_base = OTHER; note = 2'-O-methoxyethyl modified nucleotide with phosphorothioate linkage
  modified_base 3: mod_base = OTHER; note = 2'-O-methoxyethyl modified 5-methyl cytosine with phosphorothioate linkage
  modified_base 4: mod_base = OTHER; note = 2'-O-methoxyethyl modified thymine with phosphorothioate linkage
  modified_base 5: mod_base = OTHER; note = 2'-O-methoxyethyl modified thymine with phosphorothioate linkage
  modified_base 6: mod_base = OTHER; note = 2'-O-methoxyethyl modified thymine with phosphorothioate linkage
  modified_base 7: mod_base = OTHER; note = 2'-O-methoxyethyl modified 5-methyl cytosine with phosphorothioate linkage
  modified_base 8: mod_base = OTHER; note = 2'-O-methoxyethyl modified nucleotide with phosphorothioate linkage
  modified_base 9: mod_base = OTHER; note = 2'-O-methoxyethyl modified thymine with phosphorothioate linkage
  modified_base 10: mod_base = OTHER; note = 2'-O-methoxyethyl modified nucleotide
  modified_base 11: mod_base = OTHER; note = 2'-O-methoxyethyl modified nucleotide
  modified_base 12: mod_base = OTHER; note = 2'-O-methoxyethyl modified thymine with phosphorothioate linkage
  modified_base 13: mod_base = OTHER; note = 2'-O-methoxyethyl modified nucleotide with phosphorothioate linkage
  modified_base 14: mod_base = OTHER; note = 2'-O-methoxyethyl modified 5-methyl cytosine with phosphorothioate linkage
  modified_base 15: mod_base = OTHER; note = 2'-O-methoxyethyl modified thymine with phosphorothioate linkage
  modified_base 16: mod_base = OTHER; note = 2'-O-methoxyethyl modified nucleotide with phosphorothioate linkage
  modified_base 17: mod_base = OTHER; note = 2'-O-methoxyethyl modified nucleotide with phosphorothioate linkage
  modified_base 18: mod_base = OTHER; note = 2'-O-methoxyethyl modified 5-methyl cytosine
cactttcataatgctggc

SEQ ID NO: 115 - RNA, 18 nt, synthetic construct
  source 1..18: mol_type = other RNA
  modified_base 1: mod_base = OTHER; note = 2'-O-methoxyethyl modified 5-methyl cytosine with phosphorothioate linkage
  modified_base 2: mod_base = OTHER; note = 2'-O-methoxyethyl modified nucleotide with phosphorothioate linkage
  modified_base 3: mod_base = OTHER; note = 2'-O-methoxyethyl modified 5-methyl cytosine with phosphorothioate linkage
  modified_base 4: mod_base = OTHER; note = 2'-O-methoxyethyl modified thymine with phosphorothioate linkage
  modified_base 5: mod_base = OTHER; note = 2'-O-methoxyethyl modified thymine with phosphorothioate linkage
  modified_base 6: mod_base = OTHER; note = 2'-O-methoxyethyl modified thymine with phosphorothioate linkage
  modified_base 7: mod_base = OTHER; note = 2'-O-methoxyethyl modified 5-methyl cytosine with phosphorothioate linkage
  modified_base 8: mod_base = OTHER; note = 2'-O-methoxyethyl modified nucleotide with phosphorothioate linkage
  modified_base 9: mod_base = OTHER; note = 2'-O-methoxyethyl modified thymine with phosphorothioate linkage
  modified_base 10: mod_base = OTHER; note = 2'-O-methoxyethyl modified nucleotide with phosphorothioate linkage
  modified_base 11: mod_base = OTHER; note = 2'-O-methoxyethyl modified nucleotide with phosphorothioate linkage
  modified_base 12: mod_base = OTHER; note = 2'-O-methoxyethyl modified thymine
  modified_base 13: mod_base = OTHER; note = 2'-O-methoxyethyl modified nucleotide
  modified_base 14: mod_base = OTHER; note = 2'-O-methoxyethyl modified 5-methyl cytosine with phosphorothioate linkage
  modified_base 15: mod_base = OTHER; note = 2'-O-methoxyethyl modified thymine with phosphorothioate linkage
  modified_base 16: mod_base = OTHER; note = 2'-O-methoxyethyl modified nucleotide with phosphorothioate linkage
  modified_base 17: mod_base = OTHER; note = 2'-O-methoxyethyl modified nucleotide with phosphorothioate linkage
  modified_base 18: mod_base = OTHER; note = 2'-O-methoxyethyl modified 5-methyl cytosine
cactttcataatgctggc

SEQ ID NO: 116 - RNA, 18 nt, synthetic construct
  source 1..18: mol_type = other RNA
  modified_base 1: mod_base = OTHER; note = 2'-O-methoxyethyl modified 5-methyl cytosine with phosphorothioate linkage
  modified_base 2: mod_base = OTHER; note = 2'-O-methoxyethyl modified nucleotide with phosphorothioate linkage
  modified_base 3: mod_base = OTHER; note = 2'-O-methoxyethyl modified 5-methyl cytosine with phosphorothioate linkage
  modified_base 4: mod_base = OTHER; note = 2'-O-methoxyethyl modified thymine with phosphorothioate linkage
  modified_base 5: mod_base = OTHER; note = 2'-O-methoxyethyl modified thymine with phosphorothioate linkage
  modified_base 6: mod_base = OTHER; note = 2'-O-methoxyethyl modified thymine with phosphorothioate linkage
  modified_base 7: mod_base = OTHER; note = 2'-O-methoxyethyl modified 5-methyl cytosine with phosphorothioate linkage
  modified_base 8: mod_base = OTHER; note = 2'-O-methoxyethyl modified nucleotide with phosphorothioate linkage
  modified_base 9: mod_base = OTHER; note = 2'-O-methoxyethyl modified thymine with phosphorothioate linkage
  modified_base 10: mod_base = OTHER; note = 2'-O-methoxyethyl modified nucleotide with phosphorothioate linkage
  modified_base 11: mod_base = OTHER; note = 2'-O-methoxyethyl modified nucleotide with phosphorothioate linkage
  modified_base 12: mod_base = OTHER; note = 2'-O-methoxyethyl modified thymine with phosphorothioate linkage
  modified_base 13: mod_base = OTHER; note = 2'-O-methoxyethyl modified nucleotide with phosphorothioate linkage
  modified_base 14: mod_base = OTHER; note = 2'-O-methoxyethyl modified 5-methyl cytosine
  modified_base 15: mod_base = OTHER; note = 2'-O-methoxyethyl modified thymine
  modified_base 16: mod_base = OTHER; note = 2'-O-methoxyethyl modified nucleotide with phosphorothioate linkage
  modified_base 17: mod_base = OTHER; note = 2'-O-methoxyethyl modified nucleotide with phosphorothioate linkage
  modified_base 18: mod_base = OTHER; note = 2'-O-methoxyethyl modified 5-methyl cytosine
cactttcataatgctggc

SEQ ID NO: 117 - RNA, 18 nt, synthetic construct
  source 1..18: mol_type = other RNA
  modified_base 1: mod_base = OTHER; note = 2'-O-methoxyethyl modified 5-methyl cytosine with phosphorothioate linkage
  modified_base 2: mod_base = OTHER; note = 2'-O-methoxyethyl modified nucleotide with phosphorothioate linkage
  modified_base 3: mod_base = OTHER; note = 2'-O-methoxyethyl modified 5-methyl cytosine
  modified_base 4: mod_base = OTHER; note = 2'-O-methoxyethyl modified thymine with phosphorothioate linkage
  modified_base 5: mod_base = OTHER; note = 2'-O-methoxyethyl modified thymine with phosphorothioate linkage
  modified_base 6: mod_base = OTHER; note = 2'-O-methoxyethyl modified thymine with phosphorothioate linkage
  modified_base 7: mod_base = OTHER; note = 2'-O-methoxyethyl modified 5-methyl cytosine with phosphorothioate linkage
  modified_base 8: mod_base = OTHER; note = 2'-O-methoxyethyl modified nucleotide with phosphorothioate linkage
  modified_base 9: mod_base = OTHER; note = 2'-O-methoxyethyl modified thymine
  modified_base 10: mod_base = OTHER; note = 2'-O-methoxyethyl modified nucleotide with phosphorothioate linkage
  modified_base 11: mod_base = OTHER; note = 2'-O-methoxyethyl modified nucleotide with phosphorothioate linkage
  modified_base 12: mod_base = OTHER; note = 2'-O-methoxyethyl modified thymine with phosphorothioate linkage
  modified_base 13: mod_base = OTHER; note = 2'-O-methoxyethyl modified nucleotide with phosphorothioate linkage
  modified_base 14: mod_base = OTHER; note = 2'-O-methoxyethyl modified 5-methyl cytosine with phosphorothioate linkage
  modified_base 15: mod_base = OTHER; note = 2'-O-methoxyethyl modified thymine
  modified_base 16: mod_base = OTHER; note = 2'-O-methoxyethyl modified nucleotide with phosphorothioate linkage
  modified_base 17: mod_base = OTHER; note = 2'-O-methoxyethyl modified nucleotide with phosphorothioate linkage
  modified_base 18: mod_base = OTHER; note = 2'-O-methoxyethyl modified 5-methyl cytosine
cactttcataatgctggc

SEQ ID NO: 118 - RNA, 18 nt, synthetic construct
  source 1..18: mol_type = other RNA
  modified_base 1: mod_base = OTHER; note = 2'-O-methoxyethyl modified 5-methyl cytosine with phosphorothioate linkage
  modified_base 2: mod_base = OTHER; note = 2'-O-methoxyethyl modified nucleotide with phosphorothioate linkage
  modified_base 3: mod_base = OTHER; note = 2'-O-methoxyethyl modified 5-methyl cytosine with phosphorothioate linkage
  modified_base 4: mod_base = OTHER; note = 2'-O-methoxyethyl modified thymine with phosphorothioate linkage
  modified_base 5: mod_base = OTHER; note = 2'-O-methoxyethyl modified thymine with phosphorothioate linkage
  modified_base 6: mod_base = OTHER; note = 2'-O-methoxyethyl modified thymine with phosphorothioate linkage
  modified_base 7: mod_base = OTHER; note = 2'-O-methoxyethyl modified 5-methyl cytosine with phosphorothioate linkage
  modified_base 8: mod_base = OTHER; note = 2'-O-methoxyethyl modified nucleotide
  modified_base 9: mod_base = OTHER; note = 2'-O-methoxyethyl modified thymine
  modified_base 10: mod_base = OTHER; note = 2'-O-methoxyethyl modified nucleotide
  modified_base 11: mod_base = OTHER; note = 2'-O-methoxyethyl modified nucleotide with phosphorothioate linkage
  modified_base 12: mod_base = OTHER; note = 2'-O-methoxyethyl modified thymine with phosphorothioate linkage
  modified_base 13: mod_base = OTHER; note = 2'-O-methoxyethyl modified nucleotide with phosphorothioate linkage
  modified_base 14: mod_base = OTHER; note = 2'-O-methoxyethyl modified 5-methyl cytosine with phosphorothioate linkage
  modified_base 15: mod_base = OTHER; note = 2'-O-methoxyethyl modified thymine with phosphorothioate linkage
  modified_base 16: mod_base = OTHER; note = 2'-O-methoxyethyl modified nucleotide with phosphorothioate linkage
  modified_base 17: mod_base = OTHER; note = 2'-O-methoxyethyl modified nucleotide with phosphorothioate linkage
  modified_base 18: mod_base = OTHER; note = 2'-O-methoxyethyl modified 5-methyl cytosine
cactttcataatgctggc

SEQ ID NO: 119 - RNA, 18 nt, synthetic construct
  source 1..18: mol_type = other RNA
  modified_base 1: mod_base = OTHER; note = 2'-O-methoxyethyl modified 5-methyl cytosine with phosphorothioate linkage
  modified_base 2: mod_base = OTHER; note = 2'-O-methoxyethyl modified nucleotide
  modified_base 3: mod_base = OTHER; note = 2'-O-methoxyethyl modified 5-methyl cytosine
  modified_base 4: mod_base = OTHER; note = 2'-O-methoxyethyl modified thymine with phosphorothioate linkage
  modified_base 5: mod_base = OTHER; note = 2'-O-methoxyethyl modified thymine with phosphorothioate linkage
  modified_base 6: mod_base = OTHER; note = 2'-O-methoxyethyl modified thymine with phosphorothioate linkage
  modified_base 7: mod_base = OTHER; note = 2'-O-methoxyethyl modified 5-methyl cytosine with phosphorothioate linkage
  modified_base 8: mod_base = OTHER; note = 2'-O-methoxyethyl modified nucleotide with phosphorothioate linkage
  modified_base 9: mod_base = OTHER; note = 2'-O-methoxyethyl modified thymine with phosphorothioate linkage
  modified_base 10: mod_base = OTHER; note = 2'-O-methoxyethyl modified nucleotide with phosphorothioate linkage
  modified_base 11: mod_base = OTHER; note = 2'-O-methoxyethyl modified nucleotide with phosphorothioate linkage
  modified_base 12: mod_base = OTHER; note = 2'-O-methoxyethyl modified thymine with phosphorothioate linkage
  modified_base 13: mod_base = OTHER; note = 2'-O-methoxyethyl modified nucleotide with phosphorothioate linkage
  modified_base 14: mod_base = OTHER; note = 2'-O-methoxyethyl modified 5-methyl cytosine
  modified_base 15: mod_base = OTHER; note = 2'-O-methoxyethyl modified thymine
  modified_base 16: mod_base = OTHER; note = 2'-O-methoxyethyl modified nucleotide with phosphorothioate linkage
  modified_base 17: mod_base = OTHER; note = 2'-O-methoxyethyl modified nucleotide with phosphorothioate linkage
  modified_base 18: mod_base = OTHER; note = 2'-O-methoxyethyl modified 5-methyl cytosine
cactttcataatgctggc

SEQ ID NO: 120 - RNA, 18 nt, synthetic construct
  source 1..18: mol_type = other RNA
  modified_base 1: mod_base = OTHER; note = 2'-O-methoxyethyl modified 5-methyl cytosine with phosphorothioate linkage
  modified_base 2: mod_base = OTHER; note = 2'-O-methoxyethyl modified nucleotide with phosphorothioate linkage
  modified_base 3: mod_base = OTHER; note = 2'-O-methoxyethyl modified 5-methyl cytosine with phosphorothioate linkage
  modified_base 4: mod_base = OTHER; note = 2'-O-methoxyethyl modified thymine with phosphorothioate linkage
  modified_base 5: mod_base = OTHER; note = 2'-O-methoxyethyl modified thymine with phosphorothioate linkage
  modified_base 6: mod_base = OTHER; note = 2'-O-methoxyethyl modified thymine with phosphorothioate linkage
  modified_base 7: mod_base = OTHER; note = 2'-O-methoxyethyl modified 5-methyl cytosine with phosphorothioate linkage
  modified_base 8: mod_base = OTHER; note = 2'-O-methoxyethyl modified nucleotide
  modified_base 9: mod_base = OTHER; note = 2'-O-methoxyethyl modified thymine
  modified_base 10: mod_base = OTHER; note = 2'-O-methoxyethyl modified nucleotide
  modified_base 11: mod_base = OTHER; note = 2'-O-methoxyethyl modified nucleotide
  modified_base 12: mod_base = OTHER; note = 2'-O-methoxyethyl modified thymine with phosphorothioate linkage
  modified_base 13: mod_base = OTHER; note = 2'-O-methoxyethyl modified nucleotide with phosphorothioate linkage
  modified_base 14: mod_base = OTHER; note = 2'-O-methoxyethyl modified 5-methyl cytosine with phosphorothioate linkage
  modified_base 15: mod_base = OTHER; note = 2'-O-methoxyethyl modified thymine with phosphorothioate linkage
  modified_base 16: mod_base = OTHER; note = 2'-O-methoxyethyl modified nucleotide with phosphorothioate linkage
  modified_base 17: mod_base = OTHER; note = 2'-O-methoxyethyl modified nucleotide with phosphorothioate linkage
  modified_base 18: mod_base = OTHER; note = 2'-O-methoxyethyl modified 5-methyl cytosine
cactttcataatgctggc

SEQ ID NO: 121 - RNA, 18 nt, synthetic construct
  source 1..18: mol_type = other RNA
  modified_base 1: mod_base = OTHER; note = 2'-O-methoxyethyl modified 5-methyl cytosine with phosphorothioate linkage
  modified_base 2: mod_base = OTHER; note = 2'-O-methoxyethyl modified nucleotide with phosphorothioate linkage
  modified_base 3: mod_base = OTHER; note = 2'-O-methoxyethyl modified 5-methyl cytosine
  modified_base 4: mod_base = OTHER; note = 2'-O-methoxyethyl modified thymine
  modified_base 5: mod_base = OTHER; note = 2'-O-methoxyethyl modified thymine
  modified_base 6: mod_base = OTHER; note = 2'-O-methoxyethyl modified thymine
  modified_base 7: mod_base = OTHER; note = 2'-O-methoxyethyl modified 5-methyl cytosine with phosphorothioate linkage
  modified_base 8: mod_base = OTHER; note = 2'-O-methoxyethyl modified nucleotide with phosphorothioate linkage
  modified_base 9: mod_base = OTHER; note = 2'-O-methoxyethyl modified thymine with phosphorothioate linkage
  modified_base 10: mod_base = OTHER; note = 2'-O-methoxyethyl modified nucleotide with phosphorothioate linkage
  modified_base 11: mod_base = OTHER; note = 2'-O-methoxyethyl modified nucleotide with phosphorothioate linkage
  modified_base 12: mod_base = OTHER; note = 2'-O-methoxyethyl modified thymine with phosphorothioate linkage
  modified_base 13: mod_base = OTHER; note = 2'-O-methoxyethyl modified nucleotide with phosphorothioate linkage
  modified_base 14: mod_base = OTHER; note = 2'-O-methoxyethyl modified 5-methyl cytosine with phosphorothioate linkage
  modified_base 15: mod_base = OTHER; note = 2'-O-methoxyethyl modified thymine with phosphorothioate linkage
  modified_base 16: mod_base = OTHER; note = 2'-O-methoxyethyl modified nucleotide with phosphorothioate linkage
  modified_base 17: mod_base = OTHER; note = 2'-O-methoxyethyl modified nucleotide with phosphorothioate linkage
  modified_base 18: mod_base = OTHER; note = 2'-O-methoxyethyl modified 5-methyl cytosine
cactttcataatgctggc

SEQ ID NO: 122 - RNA, 18 nt, synthetic construct
  source 1..18: mol_type = other RNA
  modified_base 1: mod_base = OTHER; note = 2'-O-methoxyethyl modified 5-methyl cytosine with phosphorothioate linkage
  modified_base 2: mod_base = OTHER; note = 2'-O-methoxyethyl modified nucleotide with phosphorothioate linkage
  modified_base 3: mod_base = OTHER; note = 2'-O-methoxyethyl modified 5-methyl cytosine with phosphorothioate linkage
  modified_base 4: mod_base = OTHER; note = 2'-O-methoxyethyl modified thymine with phosphorothioate linkage
  modified_base 5: mod_base = OTHER; note = 2'-O-methoxyethyl modified thymine
  modified_base 6: mod_base = OTHER; note = 2'-O-methoxyethyl modified thymine
  modified_base 7: mod_base = OTHER; note = 2'-O-methoxyethyl modified 5-methyl cytosine
  modified_base 8: mod_base = OTHER; note = 2'-O-methoxyethyl modified nucleotide
  modified_base 9: mod_base = OTHER; note = 2'-O-methoxyethyl modified thymine with phosphorothioate linkage
  modified_base 10: mod_base = OTHER; note = 2'-O-methoxyethyl modified nucleotide with phosphorothioate linkage
  modified_base 11: mod_base = OTHER; note = 2'-O-methoxyethyl modified nucleotide with phosphorothioate linkage
  modified_base 12: mod_base = OTHER; note = 2'-O-methoxyethyl modified thymine with phosphorothioate linkage
  modified_base 13: mod_base = OTHER; note = 2'-O-methoxyethyl modified nucleotide with phosphorothioate linkage
  modified_base 14: mod_base = OTHER; note = 2'-O-methoxyethyl modified 5-methyl cytosine with phosphorothioate linkage
  modified_base 15: mod_base = OTHER; note = 2'-O-methoxyethyl modified thymine with phosphorothioate linkage
  modified_base 16: mod_base = OTHER; note = 2'-O-methoxyethyl modified nucleotide with phosphorothioate linkage
  modified_base 17: mod_base = OTHER; note = 2'-O-methoxyethyl modified nucleotide with phosphorothioate linkage
  modified_base 18: mod_base = OTHER; note = 2'-O-methoxyethyl modified 5-methyl cytosine
cactttcataatgctggc

SEQ ID NO: 123 - RNA, 18 nt, synthetic construct
  source 1..18: mol_type = other RNA
  modified_base 1: mod_base = OTHER; note = 2'-O-methoxyethyl modified 5-methyl cytosine with phosphorothioate linkage
  modified_base 2: mod_base = OTHER; note = 2'-O-methoxyethyl modified nucleotide with phosphorothioate linkage
  modified_base 3: mod_base = OTHER; note = 2'-O-methoxyethyl modified 5-methyl cytosine with phosphorothioate linkage
  modified_base 4: mod_base = OTHER; note = 2'-O-methoxyethyl modified thymine with phosphorothioate linkage
  modified_base 5: mod_base = OTHER; note = 2'-O-methoxyethyl modified thymine with phosphorothioate linkage
  modified_base 6: mod_base = OTHER; note = 2'-O-methoxyethyl modified thymine with phosphorothioate linkage
  modified_base 7: mod_base = OTHER; note = 2'-O-methoxyethyl modified 5-methyl cytosine
  modified_base 8: mod_base = OTHER; note = 2'-O-methoxyethyl modified nucleotide
  modified_base 9: mod_base = OTHER; note = 2'-O-methoxyethyl modified thymine
  modified_base 10: mod_base = OTHER; note = 2'-O-methoxyethyl modified nucleotide
  modified_base 11: mod_base = OTHER; note = 2'-O-methoxyethyl modified nucleotide with phosphorothioate linkage
  modified_base 12: mod_base = OTHER; note = 2'-O-methoxyethyl modified thymine with phosphorothioate linkage
  modified_base 13: mod_base = OTHER; note = 2'-O-methoxyethyl modified nucleotide with phosphorothioate linkage
  modified_base 14: mod_base = OTHER; note = 2'-O-methoxyethyl modified 5-methyl cytosine with phosphorothioate linkage
  modified_base 15: mod_base = OTHER; note = 2'-O-methoxyethyl modified thymine with phosphorothioate linkage
  modified_base 16: mod_base = OTHER; note = 2'-O-methoxyethyl modified nucleotide with phosphorothioate linkage
  modified_base 17: mod_base = OTHER; note = 2'-O-methoxyethyl modified nucleotide with phosphorothioate linkage
  modified_base 18: mod_base = OTHER; note = 2'-O-methoxyethyl modified 5-methyl cytosine
cactttcataatgctggc

SEQ ID NO: 124 - RNA, 18 nt, synthetic construct
  source 1..18: mol_type = other RNA
  modified_base 1: mod_base = OTHER; note = 2'-O-methoxyethyl modified 5-methyl cytosine with phosphorothioate linkage
  modified_base 2: mod_base = OTHER; note = 2'-O-methoxyethyl modified nucleotide with phosphorothioate linkage
  modified_base 3: mod_base = OTHER; note = 2'-O-methoxyethyl modified 5-methyl cytosine with phosphorothioate linkage
  modified_base 4: mod_base = OTHER; note = 2'-O-methoxyethyl modified thymine with phosphorothioate linkage
  modified_base 5: mod_base = OTHER; note = 2'-O-methoxyethyl modified thymine with phosphorothioate linkage
  modified_base 6: mod_base = OTHER; note = 2'-O-methoxyethyl modified thymine with phosphorothioate linkage
  modified_base 7: mod_base = OTHER; note = 2'-O-methoxyethyl modified 5-methyl cytosine with phosphorothioate linkage
  modified_base 8: mod_base = OTHER; note = 2'-O-methoxyethyl modified nucleotide with phosphorothioate linkage
  modified_base 9: mod_base = OTHER; note = 2'-O-methoxyethyl modified thymine
  modified_base 10: mod_base = OTHER; note = 2'-O-methoxyethyl modified nucleotide
  modified_base 11: mod_base = OTHER; note = 2'-O-methoxyethyl modified nucleotide
  modified_base 12: mod_base = OTHER; note = 2'-O-methoxyethyl modified thymine
  modified_base 13: mod_base = OTHER; note = 2'-O-methoxyethyl modified nucleotide with phosphorothioate linkage
  modified_base 14: mod_base = OTHER; note = 2'-O-methoxyethyl modified 5-methyl cytosine with phosphorothioate linkage
  modified_base 15: mod_base = OTHER; note = 2'-O-methoxyethyl modified thymine with phosphorothioate linkage
  modified_base 16: mod_base = OTHER; note = 2'-O-methoxyethyl modified nucleotide with phosphorothioate linkage
  modified_base 17: mod_base = OTHER; note = 2'-O-methoxyethyl modified nucleotide with phosphorothioate linkage
  modified_base 18: mod_base = OTHER; note = 2'-O-methoxyethyl modified 5-methyl cytosine
cactttcataatgctggc

SEQ ID NO: 125 - RNA, 18 nt, synthetic construct
  source 1..18: mol_type = other RNA
  modified_base 1: mod_base = OTHER; note = 2'-O-methoxyethyl modified 5-methyl cytosine with phosphorothioate linkage
  modified_base 2: mod_base = OTHER; note = 2'-O-methoxyethyl modified nucleotide with phosphorothioate linkage
  modified_base 3: mod_base = OTHER; note = 2'-O-methoxyethyl modified 5-methyl cytosine with phosphorothioate linkage
  modified_base 4: mod_base = OTHER; note = 2'-O-methoxyethyl modified thymine with phosphorothioate linkage
  modified_base 5: mod_base = OTHER; note = 2'-O-methoxyethyl modified thymine with phosphorothioate linkage
  modified_base 6: mod_base = OTHER; note = 2'-O-methoxyethyl modified thymine with phosphorothioate linkage
  modified_base 7: mod_base = OTHER; note = 2'-O-methoxyethyl modified 5-methyl cytosine with phosphorothioate linkage
  modified_base 8: mod_base = OTHER; note = 2'-O-methoxyethyl modified nucleotide with phosphorothioate linkage
  modified_base 9: mod_base = OTHER; note = 2'-O-methoxyethyl modified thymine with phosphorothioate linkage
  modified_base 10: mod_base = OTHER; note = 2'-O-methoxyethyl modified nucleotide with phosphorothioate linkage
  modified_base 11: mod_base = OTHER; note = 2'-O-methoxyethyl modified nucleotide
  modified_base 12: mod_base = OTHER; note = 2'-O-methoxyethyl modified thymine
  modified_base 13: mod_base = OTHER; note = 2'-O-methoxyethyl modified nucleotide
  modified_base 14: mod_base = OTHER; note = 2'-O-methoxyethyl modified 5-methyl cytosine
  modified_base 15: mod_base = OTHER; note = 2'-O-methoxyethyl modified thymine with phosphorothioate linkage
  modified_base 16: mod_base = OTHER; note = 2'-O-methoxyethyl modified nucleotide with phosphorothioate linkage
  modified_base 17: mod_base = OTHER; note = 2'-O-methoxyethyl modified nucleotide with phosphorothioate linkage
  modified_base 18: mod_base = OTHER; note = 2'-O-methoxyethyl modified 5-methyl cytosine
cactttcataatgctggc

SEQ ID NO: 126 - RNA, 18 nt, synthetic construct
  source 1..18: mol_type = other RNA
  modified_base 1: mod_base = OTHER; note = 2'-O-methoxyethyl modified 5-methyl cytosine with phosphorothioate linkage
  modified_base 2: mod_base = OTHER; note = 2'-O-methoxyethyl modified nucleotide with phosphorothioate linkage
  modified_base 3: mod_base = OTHER; note = 2'-O-methoxyethyl modified 5-methyl cytosine with phosphorothioate linkage
  modified_base 4: mod_base = OTHER; note = 2'-O-methoxyethyl modified thymine with phosphorothioate linkage
  modified_base 5: mod_base = OTHER; note = 2'-O-methoxyethyl modified thymine with phosphorothioate linkage
  modified_base 6: mod_base = OTHER; note = 2'-O-methoxyethyl modified thymine with phosphorothioate linkage
  modified_base 7: mod_base = OTHER; note = 2'-O-methoxyethyl modified 5-methyl cytosine with phosphorothioate linkage
  modified_base 8: mod_base = OTHER; note = 2'-O-methoxyethyl modified nucleotide with phosphorothioate linkage
  modified_base 9: mod_base = OTHER; note = 2'-O-methoxyethyl modified thymine with phosphorothioate linkage
  modified_base 10: mod_base = OTHER; note = 2'-O-methoxyethyl modified nucleotide with phosphorothioate linkage
  modified_base 11: mod_base = OTHER; note = 2'-O-methoxyethyl modified nucleotide with phosphorothioate linkage
  modified_base 12: mod_base = OTHER; note = 2'-O-methoxyethyl modified thymine
  modified_base 13: mod_base = OTHER; note = 2'-O-methoxyethyl modified nucleotide
  modified_base 14: mod_base = OTHER; note = 2'-O-methoxyethyl modified 5-methyl cytosine
  modified_base 15: mod_base = OTHER; note = 2'-O-methoxyethyl modified thymine
  modified_base 16: mod_base = OTHER; note = 2'-O-methoxyethyl modified nucleotide with phosphorothioate linkage
  modified_base 17: mod_base = OTHER; note = 2'-O-methoxyethyl modified nucleotide with phosphorothioate linkage
  modified_base 18: mod_base = OTHER; note = 2'-O-methoxyethyl modified 5-methyl cytosine
cactttcataatgctggc

SEQ ID NO: 127 - RNA, 18 nt, synthetic construct
  source 1..18: mol_type = other RNA
  modified_base 1: mod_base = OTHER; note = 2'-O-methoxyethyl modified 5-methyl cytosine with phosphorothioate linkage
  modified_base 2: mod_base = OTHER; note = 2'-O-methoxyethyl modified nucleotide
  modified_base 3: mod_base = OTHER; note = 2'-O-methoxyethyl modified 5-methyl cytosine
  modified_base 4: mod_base = OTHER; note = 2'-O-methoxyethyl modified thymine
  modified_base 5: mod_base = OTHER; note = 2'-O-methoxyethyl modified thymine with phosphorothioate linkage
  modified_base 6: mod_base = OTHER; note = 2'-O-methoxyethyl modified thymine with phosphorothioate linkage
  modified_base 7: mod_base = OTHER; note = 2'-O-methoxyethyl modified 5-methyl cytosine with phosphorothioate linkage
  modified_base 8: mod_base = OTHER; note = 2'-O-methoxyethyl modified nucleotide with phosphorothioate linkage
  modified_base 9: mod_base = OTHER; note = 2'-O-methoxyethyl modified thymine with phosphorothioate linkage
  modified_base 10: mod_base = OTHER; note = 2'-O-methoxyethyl modified nucleotide with phosphorothioate linkage
  modified_base 11: mod_base = OTHER; note = 2'-O-methoxyethyl modified nucleotide with phosphorothioate linkage
  modified_base 12: mod_base = OTHER; note = 2'-O-methoxyethyl modified thymine with phosphorothioate linkage
  modified_base 13: mod_base = OTHER; note = 2'-O-methoxyethyl modified nucleotide with phosphorothioate linkage
  modified_base 14: mod_base = OTHER; note = 2'-O-methoxyethyl modified 5-methyl cytosine
  modified_base 15: mod_base = OTHER; note = 2'-O-methoxyethyl modified thymine
  modified_base 16: mod_base = OTHER; note = 2'-O-methoxyethyl modified nucleotide with phosphorothioate linkage
  modified_base 17: mod_base = OTHER; note = 2'-O-methoxyethyl modified nucleotide with phosphorothioate linkage
  modified_base 18: mod_base = OTHER; note = 2'-O-methoxyethyl modified 5-methyl cytosine
cactttcataatgctggc

SEQ ID NO: 128 - RNA, 18 nt, synthetic construct
  source 1..18: mol_type = other RNA
  modified_base 1: mod_base = OTHER; note = 2'-O-methoxyethyl modified 5-methyl cytosine with phosphorothioate linkage
  modified_base 2: mod_base = OTHER; note = 2'-O-methoxyethyl modified nucleotide with phosphorothioate linkage
  modified_base 3: mod_base = OTHER; note = 2'-O-methoxyethyl modified 5-methyl cytosine with phosphorothioate linkage
  modified_base 4: mod_base = OTHER; note = 2'-O-methoxyethyl modified thymine with phosphorothioate linkage
  modified_base 5: mod_base = OTHER; note = 2'-O-methoxyethyl modified thymine with phosphorothioate linkage
  modified_base 6: mod_base = OTHER; note = 2'-O-methoxyethyl modified thymine with phosphorothioate linkage
  modified_base 7: mod_base = OTHER; note = 2'-O-methoxyethyl modified 5-methyl cytosine
  modified_base 8: mod_base = OTHER; note = 2'-O-methoxyethyl modified nucleotide
  modified_base 9: mod_base = OTHER; note = 2'-O-methoxyethyl modified thymine
  modified_base 10: mod_base = OTHER; note = 2'-O-methoxyethyl modified nucleotide
  modified_base 11: mod_base = OTHER; note = 2'-O-methoxyethyl modified nucleotide
  modified_base 12: mod_base = OTHER; note = 2'-O-methoxyethyl modified thymine with phosphorothioate linkage
  modified_base 13: mod_base = OTHER; note = 2'-O-methoxyethyl modified nucleotide with phosphorothioate linkage
  modified_base 14: mod_base = OTHER; note = 2'-O-methoxyethyl modified 5-methyl cytosine with phosphorothioate linkage
  modified_base 15: mod_base = OTHER; note = 2'-O-methoxyethyl modified thymine with phosphorothioate linkage
  modified_base 16: mod_base = OTHER; note = 2'-O-methoxyethyl modified nucleotide with phosphorothioate linkage
  modified_base 17: mod_base = OTHER; note = 2'-O-methoxyethyl modified nucleotide with phosphorothioate linkage
  modified_base 18: mod_base = OTHER; note = 2'-O-methoxyethyl modified 5-methyl cytosine
cactttcataatgctggc

SEQ ID NO: 129 - RNA, 18 nt, synthetic construct
  source 1..18: mol_type = other RNA
  modified_base 1: mod_base = OTHER; note = 2'-O-methoxyethyl modified 5-methyl cytosine with phosphorothioate linkage
  modified_base 2: mod_base = OTHER; note = 2'-O-methoxyethyl modified nucleotide
  modified_base 3: mod_base = OTHER; note = 2'-O-methoxyethyl modified 5-methyl cytosine
  modified_base 4: mod_base = OTHER; note = 2'-O-methoxyethyl modified thymine
  modified_base 5: mod_base = OTHER; note = 2'-O-methoxyethyl modified thymine with phosphorothioate linkage
  modified_base 6: mod_base = OTHER; note = 2'-O-methoxyethyl modified thymine with phosphorothioate linkage
  modified_base 7: mod_base = OTHER; note = 2'-O-methoxyethyl modified 5-methyl cytosine with phosphorothioate linkage
  modified_base 8: mod_base = OTHER; note = 2'-O-methoxyethyl modified nucleotide with phosphorothioate linkage
  modified_base 9: mod_base = OTHER; note = 2'-O-methoxyethyl modified thymine with phosphorothioate linkage
  modified_base 10: mod_base = OTHER; note = 2'-O-methoxyethyl modified nucleotide with phosphorothioate linkage
  modified_base 11: mod_base = OTHER; note = 2'-O-methoxyethyl modified nucleotide with phosphorothioate linkage
  modified_base 12: mod_base = OTHER; note = 2'-O-methoxyethyl modified thymine with phosphorothioate linkage
  modified_base 13: mod_base = OTHER; note = 2'-O-methoxyethyl modified nucleotide
  modified_base 14: mod_base = OTHER; note = 2'-O-methoxyethyl modified 5-methyl cytosine
  modified_base 15: mod_base = OTHER; note = 2'-O-methoxyethyl modified thymine
  modified_base 16: mod_base = OTHER; note = 2'-O-methoxyethyl modified nucleotide with phosphorothioate linkage
  modified_base 17: mod_base = OTHER; note = 2'-O-methoxyethyl modified nucleotide with phosphorothioate linkage
  modified_base 18: mod_base = OTHER; note = 2'-O-methoxyethyl modified 5-methyl cytosine
cactttcataatgctggc

SEQ ID NO: 130 - RNA, 18 nt, synthetic construct
  source 1..18: mol_type = other RNA
  modified_base 1: mod_base = OTHER; note = 2'-O-methoxyethyl modified 5-methyl cytosine with phosphorothioate linkage
  modified_base 2: mod_base = OTHER; note = 2'-O-methoxyethyl modified nucleotide with phosphorothioate linkage
  modified_base 3: mod_base = OTHER; note = 2'-O-methoxyethyl modified 5-methyl cytosine with phosphorothioate linkage
  modified_base 4: mod_base = OTHER; note = 2'-O-methoxyethyl modified thymine with phosphorothioate linkage
  modified_base 5: mod_base = OTHER; note = 2'-O-methoxyethyl modified thymine with phosphorothioate linkage
  modified_base 6: mod_base = OTHER; note = 2'-O-methoxyethyl modified thymine with phosphorothioate linkage
  modified_base 7: mod_base = OTHER; note = 2'-O-methoxyethyl modified 5-methyl cytosine
  modified_base 8: mod_base = OTHER; note = 2'-O-methoxyethyl modified nucleotide
  modified_base 9: mod_base = OTHER; note = 2'-O-methoxyethyl modified thymine
  modified_base 10: mod_base = OTHER; note = 2'-O-methoxyethyl modified nucleotide
  modified_base 11: mod_base = OTHER; note = 2'-O-methoxyethyl modified nucleotide
  modified_base 12: mod_base = OTHER; note = 2'-O-methoxyethyl modified thymine
  modified_base 13: mod_base = OTHER; note = 2'-O-methoxyethyl modified nucleotide with phosphorothioate linkage
  modified_base 14: mod_base = OTHER; note = 2'-O-methoxyethyl modified 5-methyl cytosine with phosphorothioate linkage
  modified_base 15: mod_base = OTHER; note = 2'-O-methoxyethyl modified thymine with phosphorothioate linkage
  modified_base 16: mod_base = OTHER; note = 2'-O-methoxyethyl modified nucleotide with phosphorothioate linkage
  modified_base 17: mod_base = OTHER; note = 2'-O-methoxyethyl modified nucleotide with phosphorothioate linkage
  modified_base 18: mod_base = OTHER; note = 2'-O-methoxyethyl modified 5-methyl cytosine
cactttcataatgctggc

SEQ ID NO: 131 - RNA, 18 nt, synthetic construct
  source 1..18: mol_type = other RNA
  modified_base 1: mod_base = OTHER; note = 2'-O-methoxyethyl modified 5-methyl cytosine with phosphorothioate linkage
  modified_base 2: mod_base = OTHER; note = 2'-O-methoxyethyl modified nucleotide
  modified_base 3: mod_base = OTHER; note = 2'-O-methoxyethyl modified 5-methyl cytosine
  modified_base 4: mod_base = OTHER; note = 2'-O-methoxyethyl modified thymine
  modified_base 5: mod_base = OTHER; note = 2'-O-methoxyethyl modified thymine
  modified_base 6: mod_base = OTHER; note = 2'-O-methoxyethyl modified thymine with phosphorothioate linkage
  modified_base 7: mod_base = OTHER; note = 2'-O-methoxyethyl modified 5-methyl cytosine with phosphorothioate linkage
  modified_base 8: mod_base = OTHER; note = 2'-O-methoxyethyl modified nucleotide with phosphorothioate linkage
  modified_base 9: mod_base = OTHER; note = 2'-O-methoxyethyl modified thymine with phosphorothioate linkage
  modified_base 10: mod_base = OTHER; note = 2'-O-methoxyethyl modified nucleotide with phosphorothioate linkage
  modified_base 11: mod_base = OTHER; note = 2'-O-methoxyethyl modified nucleotide with phosphorothioate linkage
  modified_base 12: mod_base = OTHER; note = 2'-O-methoxyethyl modified thymine with phosphorothioate linkage
  modified_base 13: mod_base = OTHER; note = 2'-O-methoxyethyl modified nucleotide
  modified_base 14: mod_base = OTHER; note = 2'-O-methoxyethyl modified 5-methyl cytosine
  modified_base 15: mod_base = OTHER; note = 2'-O-methoxyethyl modified thymine
  modified_base 16: mod_base = OTHER; note = 2'-O-methoxyethyl modified nucleotide with phosphorothioate linkage
  modified_base 17: mod_base = OTHER; note = 2'-O-methoxyethyl modified nucleotide with phosphorothioate linkage
  modified_base 18: mod_base = OTHER; note = 2'-O-methoxyethyl modified 5-methyl cytosine
cactttcataatgctggc

SEQ ID NO: 132 - RNA, 18 nt, synthetic construct
  source 1..18: mol_type = other RNA
  modified_base 1: mod_base = OTHER; note = 2'-O-methoxyethyl modified 5-methyl cytosine with phosphorothioate linkage
  modified_base 2: mod_base = OTHER; note = 2'-O-methoxyethyl modified nucleotide with phosphorothioate linkage
  modified_base 3: mod_base = OTHER; note = 2'-O-methoxyethyl modified 5-methyl cytosine with phosphorothioate linkage
  modified_base 4: mod_base = OTHER; note = 2'-O-methoxyethyl modified thymine with phosphorothioate linkage
  modified_base 5: mod_base = OTHER; note = 2'-O-methoxyethyl modified thymine with phosphorothioate linkage
  modified_base 6: mod_base = OTHER; note = 2'-O-methoxyethyl modified thymine
  modified_base 7: mod_base = OTHER; note = 2'-O-methoxyethyl modified 5-methyl cytosine
  modified_base 8: mod_base = OTHER; note = 2'-O-methoxyethyl modified nucleotide
  modified_base 9: mod_base = OTHER; note = 2'-O-methoxyethyl modified thymine
  modified_base 10: mod_base = OTHER; note = 2'-O-methoxyethyl modified nucleotide
  modified_base 11: mod_base = OTHER; note = 2'-O-methoxyethyl modified nucleotide
  modified_base 12: mod_base = OTHER; note = 2'-O-methoxyethyl modified thymine
  modified_base 13: mod_base = OTHER; note = 2'-O-methoxyethyl modified nucleotide with phosphorothioate linkage
  modified_base 14: mod_base = OTHER; note = 2'-O-methoxyethyl modified 5-methyl cytosine with phosphorothioate linkage
  modified_base 15: mod_base = OTHER; note = 2'-O-methoxyethyl modified thymine with phosphorothioate linkage
  modified_base 16: mod_base = OTHER; note = 2'-O-methoxyethyl modified nucleotide with phosphorothioate linkage
  modified_base 17: mod_base = OTHER; note = 2'-O-methoxyethyl modified nucleotide with phosphorothioate linkage
  modified_base 18: mod_base = OTHER; note = 2'-O-methoxyethyl modified 5-methyl cytosine
cactttcataatgctggc

SEQ ID NO: 133 - RNA, 18 nt, synthetic construct
  source 1..18: mol_type = other RNA
  modified_base 1: mod_base = OTHER; note = 2'-O-methoxyethyl modified thymine with phosphorothioate linkage
  modified_base 2: mod_base = OTHER; note = 2'-O-methoxyethyl modified 5-methyl cytosine with phosphorothioate linkage
  modified_base 3: mod_base = OTHER; note = 2'-O-methoxyethyl modified nucleotide with phosphorothioate linkage
  modified_base 4: mod_base = OTHER; note = 2'-O-methoxyethyl modified 5-methyl cytosine with phosphorothioate linkage
  modified_base 5: mod_base = OTHER; note = 2'-O-methoxyethyl modified thymine with phosphorothioate linkage
  modified_base 6: mod_base = OTHER; note = 2'-O-methoxyethyl modified thymine with phosphorothioate linkage
  modified_base 7: mod_base = OTHER; note = 2'-O-methoxyethyl modified thymine with phosphorothioate linkage
  modified_base 8: mod_base = OTHER; note = 2'-O-methoxyethyl modified 5-methyl cytosine with phosphorothioate linkage
  modified_base 9: mod_base = OTHER; note = 2'-O-methoxyethyl modified nucleotide with phosphorothioate linkage
  modified_base 10: mod_base = OTHER; note = 2'-O-methoxyethyl modified thymine with phosphorothioate linkage
  modified_base 11: mod_base = OTHER; note = 2'-O-methoxyethyl modified nucleotide with phosphorothioate linkage
  modified_base 12: mod_base = OTHER; note = 2'-O-methoxyethyl modified nucleotide with phosphorothioate linkage
  modified_base 13: mod_base = OTHER; note = 2'-O-methoxyethyl modified thymine with phosphorothioate linkage
  modified_base 14: mod_base = OTHER; note = 2'-O-methoxyethyl modified nucleotide with phosphorothioate linkage
  modified_base 15: mod_base = OTHER; note = 2'-O-methoxyethyl modified 5-methyl cytosine
  modified_base 16: mod_base = OTHER; note = 2'-O-methoxyethyl modified thymine with phosphorothioate linkage
  modified_base 17: mod_base = OTHER; note = 2'-O-methoxyethyl modified nucleotide with phosphorothioate linkage
  modified_base 18: mod_base = OTHER; note = 2'-O-methoxyethyl modified nucleotide
tcactttcataatgctgg

SEQ ID NO: 134 - RNA, 18 nt, synthetic construct
  source 1..18: mol_type = other RNA
  modified_base 1: mod_base = OTHER; note = 2'-O-methoxyethyl modified thymine with phosphorothioate linkage
  modified_base 2: mod_base = OTHER; note = 2'-O-methoxyethyl modified 5-methyl cytosine with phosphorothioate linkage
  modified_base 3: mod_base = OTHER; note = 2'-O-methoxyethyl modified nucleotide with phosphorothioate linkage
  modified_base 4: mod_base = OTHER; note = 2'-O-methoxyethyl modified 5-methyl cytosine with phosphorothioate linkage
  modified_base 5: mod_base = OTHER; note = 2'-O-methoxyethyl modified thymine with phosphorothioate linkage
  modified_base 6: mod_base = OTHER; note = 2'-O-methoxyethyl modified thymine with phosphorothioate linkage
  modified_base 7: mod_base = OTHER; note = 2'-O-methoxyethyl modified thymine with phosphorothioate linkage
  modified_base 8: mod_base = OTHER; note = 2'-O-methoxyethyl modified 5-methyl cytosine with phosphorothioate linkage
  modified_base 9: mod_base = OTHER; note = 2'-O-methoxyethyl modified nucleotide with phosphorothioate linkage
  modified_base 10: mod_base = OTHER; note = 2'-O-methoxyethyl modified thymine with phosphorothioate linkage
  modified_base 11: mod_base = OTHER; note = 2'-O-methoxyethyl modified nucleotide with phosphorothioate linkage
  modified_base 12: mod_base = OTHER; note = 2'-O-methoxyethyl modified nucleotide with phosphorothioate linkage
  modified_base 13: mod_base = OTHER; note = 2'-O-methoxyethyl modified thymine with phosphorothioate linkage
  modified_base 14: mod_base = OTHER; note = 2'-O-methoxyethyl modified nucleotide
  modified_base 15: mod_base = OTHER; note = 2'-O-methoxyethyl modified 5-methyl cytosine with phosphorothioate linkage
  modified_base 16: mod_base = OTHER; note = 2'-O-methoxyethyl modified thymine with phosphorothioate linkage
  modified_base 17: mod_base = OTHER; note = 2'-O-methoxyethyl modified nucleotide with phosphorothioate linkage
  modified_base 18: mod_base = OTHER; note = 2'-O-methoxyethyl modified nucleotide
tcactttcataatgctgg

SEQ ID NO: 135 - RNA, 18 nt, synthetic construct
  source 1..18: mol_type = other RNA
  modified_base 1: mod_base = OTHER; note = 2'-O-methoxyethyl modified thymine with phosphorothioate linkage
  modified_base 2: mod_base = OTHER; note = 2'-O-methoxyethyl modified 5-methyl cytosine with phosphorothioate linkage
  modified_base 3: mod_base = OTHER; note = 2'-O-methoxyethyl modified nucleotide with phosphorothioate linkage
  modified_base 4: mod_base = OTHER; note = 2'-O-methoxyethyl modified 5-methyl cytosine with phosphorothioate linkage
  modified_base 5: mod_base = OTHER; note = 2'-O-methoxyethyl modified thymine with phosphorothioate linkage
  modified_base 6: mod_base = OTHER; note = 2'-O-methoxyethyl modified thymine with phosphorothioate linkage
  modified_base 7: mod_base = OTHER; note = 2'-O-methoxyethyl modified thymine with phosphorothioate linkage
  modified_base 8: mod_base = OTHER; note = 2'-O-methoxyethyl modified 5-methyl cytosine with phosphorothioate linkage
  modified_base 9: mod_base = OTHER; note = 2'-O-methoxyethyl modified nucleotide with phosphorothioate linkage
  modified_base 10: mod_base = OTHER; note = 2'-O-methoxyethyl modified thymine with phosphorothioate linkage
  modified_base 11: mod_base = OTHER; note = 2'-O-methoxyethyl modified nucleotide with phosphorothioate linkage
  modified_base 12: mod_base = OTHER; note = 2'-O-methoxyethyl modified nucleotide with phosphorothioate linkage
  modified_base 13: mod_base = OTHER; note = 2'-O-methoxyethyl modified thymine with phosphorothioate linkage
  modified_base 14: mod_base = OTHER; note = 2'-O-methoxyethyl modified nucleotide
  modified_base 15: mod_base = OTHER; note = 2'-O-methoxyethyl modified 5-methyl cytosine
  modified_base 16: mod_base = OTHER; note = 2'-O-methoxyethyl modified thymine with phosphorothioate linkage
  modified_base 17: mod_base = OTHER; note = 2'-O-methoxyethyl modified nucleotide with phosphorothioate linkage
  modified_base 18: mod_base = OTHER; note = 2'-O-methoxyethyl modified nucleotide
tcactttcataatgctgg

SEQ ID NO: 136 - RNA, 18 nt, synthetic construct
  source 1..18: mol_type = other RNA
  modified_base 1: mod_base = OTHER; note = 2'-O-methoxyethyl modified thymine with phosphorothioate linkage
  modified_base 2: mod_base = OTHER; note = 2'-O-methoxyethyl modified 5-methyl cytosine with phosphorothioate linkage
  modified_base 3: mod_base = OTHER; note = 2'-O-methoxyethyl modified nucleotide with phosphorothioate linkage
  modified_base 4: mod_base = OTHER; note = 2'-O-methoxyethyl modified 5-methyl cytosine with phosphorothioate linkage
  modified_base 5: mod_base = OTHER; note = 2'-O-methoxyethyl modified thymine with phosphorothioate linkage
  modified_base 6: mod_base = OTHER; note = 2'-O-methoxyethyl modified thymine with phosphorothioate linkage
  modified_base 7: mod_base = OTHER; note = 2'-O-methoxyethyl modified thymine with phosphorothioate linkage
  modified_base 8: mod_base = OTHER; note = 2'-O-methoxyethyl modified 5-methyl cytosine with phosphorothioate linkage
  modified_base 9: mod_base = OTHER; note = 2'-O-methoxyethyl modified nucleotide with phosphorothioate linkage
  modified_base 10: mod_base = OTHER; note = 2'-O-methoxyethyl modified thymine with phosphorothioate linkage
  modified_base 11: mod_base = OTHER; note = 2'-O-methoxyethyl modified nucleotide with phosphorothioate linkage
  modified_base 12: mod_base = OTHER; note = 2'-O-methoxyethyl modified nucleotide with phosphorothioate linkage
  modified_base 13: mod_base = OTHER; note = 2'-O-methoxyethyl modified thymine
  modified_base 14: mod_base = OTHER; note = 2'-O-methoxyethyl modified nucleotide with phosphorothioate linkage
  modified_base 15: mod_base = OTHER; note = 2'-O-methoxyethyl modified 5-methyl cytosine
  modified_base 16: mod_base = OTHER; note = 2'-O-methoxyethyl modified thymine with phosphorothioate linkage
  modified_base 17: mod_base = OTHER; note = 2'-O-methoxyethyl modified nucleotide with phosphorothioate linkage
  modified_base 18: mod_base = OTHER; note = 2'-O-methoxyethyl modified nucleotide
tcactttcataatgctgg

SEQ ID NO: 137 - RNA, 18 nt, synthetic construct
  source 1..18: mol_type = other RNA
  modified_base 1: mod_base = OTHER; note = 2'-O-methoxyethyl modified thymine with phosphorothioate linkage
  modified_base 2: mod_base = OTHER; note = 2'-O-methoxyethyl modified 5-methyl cytosine with phosphorothioate linkage
  modified_base 3: mod_base = OTHER; note = 2'-O-methoxyethyl modified nucleotide with phosphorothioate linkage
  modified_base 4: mod_base = OTHER; note = 2'-O-methoxyethyl modified 5-methyl cytosine with phosphorothioate linkage
  modified_base 5: mod_base = OTHER; note = 2'-O-methoxyethyl modified thymine with phosphorothioate linkage
  modified_base 6: mod_base = OTHER; note = 2'-O-methoxyethyl modified thymine with phosphorothioate linkage
  modified_base 7: mod_base = OTHER; note = 2'-O-methoxyethyl modified thymine with phosphorothioate linkage
  modified_base 8: mod_base = OTHER; note = 2'-O-methoxyethyl modified 5-methyl cytosine with phosphorothioate linkage
  modified_base 9: mod_base = OTHER; note = 2'-O-methoxyethyl modified nucleotide with phosphorothioate linkage
  modified_base 10: mod_base = OTHER; note = 2'-O-methoxyethyl modified thymine with phosphorothioate linkage
  modified_base 11: mod_base = OTHER; note = 2'-O-methoxyethyl modified nucleotide with phosphorothioate linkage
  modified_base 12: mod_base = OTHER; note = 2'-O-methoxyethyl modified nucleotide
  modified_base 13: mod_base = OTHER; note = 2'-O-methoxyethyl modified thymine with phosphorothioate linkage
  modified_base 14: mod_base = OTHER; note = 2'-O-methoxyethyl modified nucleotide with phosphorothioate linkage
  modified_base 15: mod_base = OTHER; note = 2'-O-methoxyethyl modified 5-methyl cytosine with phosphorothioate linkage
  modified_base 16: mod_base = OTHER; note = 2'-O-methoxyethyl modified thymine with phosphorothioate linkage
  modified_base 17: mod_base = OTHER; note = 2'-O-methoxyethyl modified nucleotide with phosphorothioate linkage
  modified_base 18: mod_base = OTHER; note = 2'-O-methoxyethyl modified nucleotide
tcactttcataatgctgg

SEQ ID NO: 138 - RNA, 18 nt, synthetic construct
  source 1..18: mol_type = other RNA
  modified_base 1: mod_base = OTHER; note = 2'-O-methoxyethyl modified thymine with phosphorothioate linkage
  modified_base 2: mod_base = OTHER; note = 2'-O-methoxyethyl modified 5-methyl cytosine with phosphorothioate linkage
  modified_base 3: mod_base = OTHER; note = 2'-O-methoxyethyl modified nucleotide with phosphorothioate linkage
  modified_base 4: mod_base = OTHER; note = 2'-O-methoxyethyl modified 5-methyl cytosine with phosphorothioate linkage
  modified_base 5: mod_base = OTHER; note = 2'-O-methoxyethyl modified thymine with phosphorothioate linkage
  modified_base 6: mod_base = OTHER; note = 2'-O-methoxyethyl modified thymine with phosphorothioate linkage
  modified_base 7: mod_base = OTHER; note = 2'-O-methoxyethyl modified thymine with phosphorothioate linkage
  modified_base 8: mod_base = OTHER; note = 2'-O-methoxyethyl modified 5-methyl cytosine with phosphorothioate linkage
  modified_base 9: mod_base = OTHER; note = 2'-O-methoxyethyl modified nucleotide with phosphorothioate linkage
  modified_base 10: mod_base = OTHER; note = 2'-O-methoxyethyl modified thymine with phosphorothioate linkage
  modified_base 11: mod_base = OTHER; note = 2'-O-methoxyethyl modified nucleotide with phosphorothioate linkage
  modified_base 12: mod_base = OTHER; note = 2'-O-methoxyethyl modified nucleotide
  modified_base 13: mod_base = OTHER; note = 2'-O-methoxyethyl modified thymine with phosphorothioate linkage
  modified_base 14: mod_base = OTHER; note = 2'-O-methoxyethyl modified nucleotide
  modified_base 15: mod_base = OTHER; note = 2'-O-methoxyethyl modified 5-methyl cytosine with phosphorothioate linkage
  modified_base 16: mod_base = OTHER; note = 2'-O-methoxyethyl modified thymine with phosphorothioate linkage
  modified_base 17: mod_base = OTHER; note = 2'-O-methoxyethyl modified nucleotide with phosphorothioate linkage
  modified_base 18: mod_base = OTHER; note = 2'-O-methoxyethyl modified nucleotide
tcactttcataatgctgg

SEQ ID NO: 139 - RNA, 18 nt, synthetic construct
  source 1..18: mol_type = other RNA
  modified_base 1: mod_base = OTHER; note = 2'-O-methoxyethyl modified thymine with phosphorothioate linkage
  modified_base 2: mod_base = OTHER; note = 2'-O-methoxyethyl modified 5-methyl cytosine with phosphorothioate linkage
  modified_base 3: mod_base = OTHER; note = 2'-O-methoxyethyl modified nucleotide with phosphorothioate linkage
  modified_base 4: mod_base = OTHER; note = 2'-O-methoxyethyl modified 5-methyl cytosine with phosphorothioate linkage
  modified_base 5: mod_base = OTHER; note = 2'-O-methoxyethyl modified thymine with phosphorothioate linkage
  modified_base 6: mod_base = OTHER; note = 2'-O-methoxyethyl modified thymine with phosphorothioate linkage
  modified_base 7: mod_base = OTHER; note = 2'-O-methoxyethyl modified thymine with phosphorothioate linkage
  modified_base 8: mod_base = OTHER; note = 2'-O-methoxyethyl modified 5-methyl cytosine with phosphorothioate linkage
  modified_base 9: mod_base = OTHER; note = 2'-O-methoxyethyl modified nucleotide with phosphorothioate linkage
  modified_base 10: mod_base = OTHER; note = 2'-O-methoxyethyl modified thymine with phosphorothioate linkage
  modified_base 11: mod_base = OTHER; note = 2'-O-methoxyethyl modified nucleotide
  modified_base 12: mod_base = OTHER; note = 2'-O-methoxyethyl modified nucleotide with phosphorothioate linkage
  modified_base 13: mod_base = OTHER; note = 2'-O-methoxyethyl modified thymine with phosphorothioate linkage
  modified_base 14: mod_base = OTHER; note = 2'-O-methoxyethyl modified nucleotide
  modified_base 15: mod_base = OTHER; note = 2'-O-methoxyethyl modified 5-methyl cytosine with phosphorothioate linkage
  modified_base 16: mod_base = OTHER; note = 2'-O-methoxyethyl modified thymine with phosphorothioate linkage
  modified_base 17: mod_base = OTHER; note = 2'-O-methoxyethyl modified nucleotide with phosphorothioate linkage
  modified_base 18: mod_base = OTHER; note = 2'-O-methoxyethyl modified nucleotide
tcactttcataatgctgg

SEQ ID NO: 140 - RNA, 18 nt, synthetic construct
  source 1..18: mol_type = other RNA
  modified_base 1: mod_base = OTHER; note = 2'-O-methoxyethyl modified thymine with phosphorothioate linkage
  modified_base 2: mod_base = OTHER; note = 2'-O-methoxyethyl modified 5-methyl cytosine with phosphorothioate linkage
  modified_base 3: mod_base = OTHER; note = 2'-O-methoxyethyl modified nucleotide with phosphorothioate linkage
  modified_base 4: mod_base = OTHER; note = 2'-O-methoxyethyl modified 5-methyl cytosine with phosphorothioate linkage
  modified_base 5: mod_base = OTHER; note = 2'-O-methoxyethyl modified thymine with phosphorothioate linkage
  modified_base 6: mod_base = OTHER; note = 2'-O-methoxyethyl modified thymine with phosphorothioate linkage
  modified_base 7: mod_base = OTHER; note = 2'-O-methoxyethyl modified thymine with phosphorothioate linkage
  modified_base 8: mod_base = OTHER; note = 2'-O-methoxyethyl modified 5-methyl cytosine with phosphorothioate linkage
  modified_base 9: mod_base = OTHER; note = 2'-O-methoxyethyl modified nucleotide with phosphorothioate linkage
  modified_base 10: mod_base = OTHER; note = 2'-O-methoxyethyl modified thymine
  modified_base 11: mod_base = OTHER; note = 2'-O-methoxyethyl modified nucleotide with phosphorothioate linkage
  modified_base 12: mod_base = OTHER; note = 2'-O-methoxyethyl modified nucleotide with phosphorothioate linkage
  modified_base 13: mod_base = OTHER; note = 2'-O-methoxyethyl modified thymine with phosphorothioate linkage
  modified_base 14: mod_base = OTHER; note = 2'-O-methoxyethyl modified nucleotide with phosphorothioate linkage
  modified_base 15: mod_base = OTHER; note = 2'-O-methoxyethyl modified 5-methyl cytosine with phosphorothioate linkage
  modified_base 16: mod_base = OTHER; note = 2'-O-methoxyethyl modified thymine with phosphorothioate linkage
  modified_base 17: mod_base = OTHER; note = 2'-O-methoxyethyl modified nucleotide with phosphorothioate linkage
  modified_base 18: mod_base = OTHER; note = 2'-O-methoxyethyl modified nucleotide
tcactttcataatgctgg

SEQ ID NO: 141 - RNA, 18 nt, synthetic construct
  source 1..18: mol_type = other RNA
  modified_base 1: mod_base = OTHER; note = 2'-O-methoxyethyl modified thymine with phosphorothioate linkage
  modified_base 2: mod_base = OTHER; note = 2'-O-methoxyethyl modified 5-methyl cytosine with phosphorothioate linkage
  modified_base 3: mod_base = OTHER; note = 2'-O-methoxyethyl modified nucleotide with phosphorothioate linkage
  modified_base 4: mod_base = OTHER; note = 2'-O-methoxyethyl modified 5-methyl cytosine with phosphorothioate linkage
  modified_base 5: mod_base = OTHER; note = 2'-O-methoxyethyl modified thymine with phosphorothioate linkage
  modified_base 6: mod_base = OTHER; note = 2'-O-methoxyethyl modified thymine with phosphorothioate linkage
  modified_base 7: mod_base = OTHER; note = 2'-O-methoxyethyl modified thymine with phosphorothioate linkage
  modified_base 8: mod_base = OTHER; note = 2'-O-methoxyethyl modified 5-methyl cytosine with phosphorothioate linkage
  modified_base 9: mod_base = OTHER; note = 2'-O-methoxyethyl modified nucleotide with phosphorothioate linkage
  modified_base 10: mod_base = OTHER; note = 2'-O-methoxyethyl modified thymine
  modified_base 11: mod_base = OTHER; note = 2'-O-methoxyethyl modified nucleotide with phosphorothioate linkage
  modified_base 12: mod_base = OTHER; note = 2'-O-methoxyethyl modified nucleotide with phosphorothioate linkage
  modified_base 13: mod_base = OTHER; note = 2'-O-methoxyethyl modified thymine with phosphorothioate linkage
  modified_base 14: mod_base = OTHER; note = 2'-O-methoxyethyl modified nucleotide
  modified_base 15: mod_base = OTHER; note = 2'-O-methoxyethyl modified 5-methyl cytosine with phosphorothioate linkage
  modified_base 16: mod_base = OTHER; note = 2'-O-methoxyethyl modified thymine with phosphorothioate linkage
  modified_base 17: mod_base = OTHER; note = 2'-O-methoxyethyl modified nucleotide with phosphorothioate linkage
  modified_base 18: mod_base = OTHER; note = 2'-O-methoxyethyl modified nucleotide
tcactttcataatgctgg

SEQ ID NO: 142 - RNA, 18 nt, synthetic construct
  source 1..18: mol_type = other RNA
  modified_base 1: mod_base = OTHER; note = 2'-O-methoxyethyl modified thymine with phosphorothioate linkage
  modified_base 2: mod_base = OTHER; note = 2'-O-methoxyethyl modified 5-methyl cytosine with phosphorothioate linkage
  modified_base 3: mod_base = OTHER; note = 2'-O-methoxyethyl modified nucleotide with phosphorothioate linkage
  modified_base 4: mod_base = OTHER; note = 2'-O-methoxyethyl modified 5-methyl cytosine with phosphorothioate linkage
  modified_base 5: mod_base = OTHER; note = 2'-O-methoxyethyl modified thymine with phosphorothioate linkage
  modified_base 6: mod_base = OTHER; note = 2'-O-methoxyethyl modified thymine with phosphorothioate linkage
  modified_base 7: mod_base = OTHER; note = 2'-O-methoxyethyl modified thymine with phosphorothioate linkage
  modified_base 8: mod_base = OTHER; note = 2'-O-methoxyethyl modified 5-methyl cytosine with phosphorothioate linkage
  modified_base 9: mod_base = OTHER; note = 2'-O-methoxyethyl modified nucleotide
  modified_base 10: mod_base = OTHER; note = 2'-O-methoxyethyl modified thymine with phosphorothioate linkage
  modified_base 11: mod_base = OTHER; note = 2'-O-methoxyethyl modified nucleotide with phosphorothioate linkage
  modified_base 12: mod_base = OTHER; note = 2'-O-methoxyethyl modified nucleotide with phosphorothioate linkage
  modified_base 13: mod_base = OTHER; note = 2'-O-methoxyethyl modified thymine with phosphorothioate linkage
  modified_base 14: mod_base = OTHER; note = 2'-O-methoxyethyl modified nucleotide with phosphorothioate linkage
  modified_base 15: mod_base = OTHER; note = 2'-O-methoxyethyl modified 5-methyl cytosine
  modified_base 16: mod_base = OTHER; note = 2'-O-methoxyethyl modified thymine with phosphorothioate linkage
  modified_base 17: mod_base = OTHER; note = 2'-O-methoxyethyl modified nucleotide with phosphorothioate linkage
  modified_base 18: mod_base = OTHER; note = 2'-O-methoxyethyl modified nucleotide
tcactttcataatgctgg

SEQ ID NO: 143 - RNA, 18 nt, synthetic construct
  source 1..18: mol_type = other RNA
  modified_base 1: mod_base = OTHER; note = 2'-O-methoxyethyl modified thymine with phosphorothioate linkage
  modified_base 2: mod_base = OTHER; note = 2'-O-methoxyethyl modified 5-methyl cytosine with phosphorothioate linkage
  modified_base 3: mod_base = OTHER; note = 2'-O-methoxyethyl modified nucleotide with phosphorothioate linkage
  modified_base 4: mod_base = OTHER; note = 2'-O-methoxyethyl modified 5-methyl cytosine with phosphorothioate linkage
  modified_base 5: mod_base = OTHER; note = 2'-O-methoxyethyl modified thymine with phosphorothioate linkage
  modified_base 6: mod_base = OTHER; note = 2'-O-methoxyethyl modified thymine with phosphorothioate linkage
  modified_base 7: mod_base = OTHER; note = 2'-O-methoxyethyl modified thymine with phosphorothioate linkage
  modified_base 8: mod_base = OTHER; note = 2'-O-methoxyethyl modified 5-methyl cytosine with phosphorothioate linkage
  modified_base 9: mod_base = OTHER; note = 2'-O-methoxyethyl modified nucleotide
  modified_base 10: mod_base = OTHER; note = 2'-O-methoxyethyl modified thymine with phosphorothioate linkage
  modified_base 11: mod_base = OTHER; note = 2'-O-methoxyethyl modified nucleotide with phosphorothioate linkage
  modified_base 12: mod_base = OTHER; note = 2'-O-methoxyethyl modified nucleotide with phosphorothioate linkage
  modified_base 13: mod_base = OTHER; note = 2'-O-methoxyethyl modified thymine with phosphorothioate linkage
  modified_base 14: mod_base = OTHER; note = 2'-O-methoxyethyl modified nucleotide
  modified_base 15: mod_base = OTHER; note = 2'-O-methoxyethyl modified 5-methyl cytosine with phosphorothioate linkage
  modified_base 16: mod_base = OTHER; note = 2'-O-methoxyethyl modified thymine with phosphorothioate linkage
  modified_base 17: mod_base = OTHER; note = 2'-O-methoxyethyl modified nucleotide with phosphorothioate linkage
  modified_base 18: mod_base = OTHER; note = 2'-O-methoxyethyl modified nucleotide
tcactttcataatgctgg

SEQ ID NO: 144 - RNA, 18 nt, synthetic construct
  source 1..18: mol_type = other RNA
  modified_base 1: mod_base = OTHER; note = 2'-O-methoxyethyl modified thymine with phosphorothioate linkage
  modified_base 2: mod_base = OTHER; note = 2'-O-methoxyethyl modified 5-methyl cytosine with phosphorothioate linkage
  modified_base 3: mod_base = OTHER; note = 2'-O-methoxyethyl modified nucleotide with phosphorothioate linkage
  modified_base 4: mod_base = OTHER; note = 2'-O-methoxyethyl modified 5-methyl cytosine with phosphorothioate linkage
  modified_base 5: mod_base = OTHER; note = 2'-O-methoxyethyl modified thymine with phosphorothioate linkage
  modified_base 6: mod_base = OTHER; note = 2'-O-methoxyethyl modified thymine with phosphorothioate linkage
  modified_base 7: mod_base = OTHER; note = 2'-O-methoxyethyl modified thymine with phosphorothioate linkage
  modified_base 8: mod_base = OTHER; note = 2'-O-methoxyethyl modified 5-methyl cytosine
  modified_base 9: mod_base = OTHER; note = 2'-O-methoxyethyl modified nucleotide with phosphorothioate linkage
  modified_base 10: mod_base = OTHER; note = 2'-O-methoxyethyl modified thymine with phosphorothioate linkage
  modified_base 11: mod_base = OTHER; note = 2'-O-methoxyethyl modified nucleotide with phosphorothioate linkage
  modified_base 12: mod_base = OTHER; note = 2'-O-methoxyethyl modified nucleotide with phosphorothioate linkage
  modified_base 13: mod_base = OTHER; note = 2'-O-methoxyethyl modified thymine with phosphorothioate linkage
  modified_base 14: mod_base = OTHER; note = 2'-O-methoxyethyl modified nucleotide with phosphorothioate linkage
  modified_base 15: mod_base = OTHER; note = 2'-O-methoxyethyl modified 5-methyl cytosine with phosphorothioate linkage
  modified_base 16: mod_base = OTHER; note = 2'-O-methoxyethyl modified thymine with phosphorothioate linkage
  modified_base 17: mod_base = OTHER; note = 2'-O-methoxyethyl modified nucleotide with phosphorothioate linkage
  modified_base 18: mod_base = OTHER; note = 2'-O-methoxyethyl modified nucleotide
tcactttcataatgctgg

SEQ ID NO: 145 - RNA, 18 nt, synthetic construct
  source 1..18: mol_type = other RNA
  modified_base 1: mod_base = OTHER; note = 2'-O-methoxyethyl modified thymine with phosphorothioate linkage
  modified_base 2: mod_base = OTHER; note = 2'-O-methoxyethyl modified 5-methyl cytosine with phosphorothioate linkage
  modified_base 3: mod_base = OTHER; note = 2'-O-methoxyethyl modified nucleotide with phosphorothioate linkage
  modified_base 4: mod_base = OTHER; note = 2'-O-methoxyethyl modified 5-methyl cytosine with phosphorothioate linkage
  modified_base 5: mod_base = OTHER; note = 2'-O-methoxyethyl modified thymine with phosphorothioate linkage
  modified_base 6: mod_base = OTHER; note = 2'-O-methoxyethyl modified thymine with phosphorothioate linkage
  modified_base 7: mod_base = OTHER; note = 2'-O-methoxyethyl modified thymine with phosphorothioate linkage
  modified_base 8: mod_base = OTHER; note = 2'-O-methoxyethyl modified 5-methyl cytosine
  modified_base 9: mod_base = OTHER; note = 2'-O-methoxyethyl modified nucleotide
  modified_base 10: mod_base = OTHER; note = 2'-O-methoxyethyl modified thymine with phosphorothioate linkage
  modified_base 11: mod_base = OTHER; note = 2'-O-methoxyethyl modified nucleotide with phosphorothioate linkage
  modified_base 12: mod_base = OTHER; note = 2'-O-methoxyethyl modified nucleotide with phosphorothioate linkage
  modified_base 13: mod_base = OTHER; note = 2'-O-methoxyethyl modified thymine with phosphorothioate linkage
  modified_base 14: mod_base = OTHER; note = 2'-O-methoxyethyl modified nucleotide with phosphorothioate linkage
  modified_base 15: mod_base = OTHER; note = 2'-O-methoxyethyl modified 5-methyl cytosine with phosphorothioate linkage
  modified_base 16: mod_base = OTHER; note = 2'-O-methoxyethyl modified thymine with phosphorothioate linkage
  modified_base 17: mod_base = OTHER; note = 2'-O-methoxyethyl modified nucleotide with phosphorothioate linkage
  modified_base 18: mod_base = OTHER; note = 2'-O-methoxyethyl modified nucleotide
tcactttcataatgctgg

SEQ ID NO: 146 - RNA, 18 nt, synthetic construct
  source 1..18: mol_type = other RNA
  modified_base 1: mod_base = OTHER; note = 2'-O-methoxyethyl modified thymine with phosphorothioate linkage
  modified_base 2: mod_base = OTHER; note = 2'-O-methoxyethyl modified 5-methyl cytosine with phosphorothioate linkage
  modified_base 3: mod_base = OTHER; note = 2'-O-methoxyethyl modified nucleotide with phosphorothioate linkage
  modified_base 4: mod_base = OTHER; note = 2'-O-methoxyethyl modified 5-methyl cytosine with phosphorothioate linkage
  modified_base 5: mod_base = OTHER; note = 2'-O-methoxyethyl modified thymine with phosphorothioate linkage
  modified_base 6: mod_base = OTHER; note = 2'-O-methoxyethyl modified thymine
  modified_base 7: mod_base = OTHER; note = 2'-O-methoxyethyl modified thymine with phosphorothioate linkage
  modified_base 8: mod_base = OTHER; note = 2'-O-methoxyethyl modified 5-methyl cytosine with phosphorothioate linkage
  modified_base 9: mod_base = OTHER; note = 2'-O-methoxyethyl modified nucleotide with phosphorothioate linkage
  modified_base 10: mod_base = OTHER; note = 2'-O-methoxyethyl modified thymine with phosphorothioate linkage
  modified_base 11: mod_base = OTHER; note = 2'-O-methoxyethyl modified nucleotide with phosphorothioate linkage
  modified_base 12: mod_base = OTHER; note = 2'-O-methoxyethyl modified nucleotide with phosphorothioate linkage
  modified_base 13: mod_base = OTHER; note = 2'-O-methoxyethyl modified thymine with phosphorothioate linkage
  modified_base 14: mod_base = OTHER; note = 2'-O-methoxyethyl modified nucleotide with phosphorothioate linkage
  modified_base 15: mod_base = OTHER; note = 2'-O-methoxyethyl modified 5-methyl cytosine with phosphorothioate linkage
  modified_base 16: mod_base = OTHER; note = 2'-O-methoxyethyl modified thymine with phosphorothioate linkage
  modified_base 17: mod_base = OTHER; note = 2'-O-methoxyethyl modified nucleotide with phosphorothioate linkage
  modified_base 18: mod_base = OTHER; note = 2'-O-methoxyethyl modified nucleotide
tcactttcataatgctgg

SEQ ID NO: 147 - RNA, 18 nt, synthetic construct
  source 1..18: mol_type = other RNA
  modified_base 1: mod_base = OTHER; note = 2'-O-methoxyethyl modified thymine with phosphorothioate linkage
  modified_base 2: mod_base = OTHER; note = 2'-O-methoxyethyl modified 5-methyl cytosine with phosphorothioate linkage
  modified_base 3: mod_base = OTHER; note = 2'-O-methoxyethyl modified nucleotide with phosphorothioate linkage
  modified_base 4: mod_base = OTHER; note = 2'-O-methoxyethyl modified 5-methyl cytosine
  modified_base 5: mod_base = OTHER; note = 2'-O-methoxyethyl modified thymine with phosphorothioate linkage
  modified_base 6: mod_base = OTHER; note = 2'-O-methoxyethyl modified thymine with phosphorothioate linkage
  modified_base 7: mod_base = OTHER; note = 2'-O-methoxyethyl modified thymine with phosphorothioate linkage
  modified_base 8: mod_base = OTHER; note = 2'-O-methoxyethyl modified 5-methyl cytosine with phosphorothioate linkage
  modified_base 9: mod_base = OTHER; note = 2'-O-methoxyethyl modified nucleotide with phosphorothioate linkage
  modified_base 10: mod_base = OTHER; note = 2'-O-methoxyethyl modified thymine with phosphorothioate linkage
  modified_base 11: mod_base = OTHER; note = 2'-O-methoxyethyl modified nucleotide with phosphorothioate linkage
  modified_base 12: mod_base = OTHER; note = 2'-O-methoxyethyl modified nucleotide with phosphorothioate linkage
  modified_base 13: mod_base = OTHER; note = 2'-O-methoxyethyl modified thymine with phosphorothioate linkage
  modified_base 14: mod_base = OTHER; note = 2'-O-methoxyethyl modified nucleotide with phosphorothioate linkage
  modified_base 15: mod_base = OTHER; note = 2'-O-methoxyethyl modified 5-methyl cytosine with phosphorothioate linkage
  modified_base 16: mod_base = OTHER; note = 2'-O-methoxyethyl modified thymine with phosphorothioate linkage
  modified_base 17: mod_base = OTHER; note = 2'-O-methoxyethyl modified nucleotide with phosphorothioate linkage
  modified_base 18: mod_base = OTHER; note = 2'-O-methoxyethyl modified nucleotide
tcactttcataatgctgg

SEQ ID NO: 148 - RNA, 18 nt, synthetic construct
  source 1..18: mol_type = other RNA
  modified_base 1: mod_base = OTHER; note = 2'-O-methoxyethyl modified thymine with phosphorothioate linkage
  modified_base 2: mod_base = OTHER; note = 2'-O-methoxyethyl modified 5-methyl cytosine
  modified_base 3: mod_base = OTHER; note = 2'-O-methoxyethyl modified nucleotide with phosphorothioate linkage
  modified_base 4: mod_base = OTHER; note = 2'-O-methoxyethyl modified 5-methyl cytosine with phosphorothioate linkage
  modified_base 5: mod_base = OTHER; note = 2'-O-methoxyethyl modified thymine with phosphorothioate linkage
  modified_base 6: mod_base = OTHER; note = 2'-O-methoxyethyl modified thymine with phosphorothioate linkage
  modified_base 7: mod_base = OTHER; note = 2'-O-methoxyethyl modified thymine with phosphorothioate linkage
  modified_base 8: mod_base = OTHER; note = 2'-O-methoxyethyl modified 5-methyl cytosine with phosphorothioate linkage
  modified_base 9: mod_base = OTHER; note = 2'-O-methoxyethyl modified nucleotide with phosphorothioate linkage
  modified_base 10: mod_base = OTHER; note = 2'-O-methoxyethyl modified thymine with phosphorothioate linkage
  modified_base 11: mod_base = OTHER; note = 2'-O-methoxyethyl modified nucleotide with phosphorothioate linkage
  modified_base 12: mod_base = OTHER; note = 2'-O-methoxyethyl modified nucleotide with phosphorothioate linkage
  modified_base 13: mod_base = OTHER; note = 2'-O-methoxyethyl modified thymine with phosphorothioate linkage
  modified_base 14: mod_base = OTHER; note = 2'-O-methoxyethyl modified nucleotide with phosphorothioate linkage
  modified_base 15: mod_base = OTHER; note = 2'-O-methoxyethyl modified 5-methyl cytosine with phosphorothioate linkage
  modified_base 16: mod_base = OTHER; note = 2'-O-methoxyethyl modified thymine with phosphorothioate linkage
  modified_base 17: mod_base = OTHER; note = 2'-O-methoxyethyl modified nucleotide with phosphorothioate linkage
  modified_base 18: mod_base = OTHER; note = 2'-O-methoxyethyl modified nucleotide
tcactttcataatgctgg

SEQ ID NO: 149 - RNA, 18 nt, synthetic construct
  source 1..18: mol_type = other RNA
  modified_base 1: mod_base = OTHER; note = 2'-O-methoxyethyl modified thymine with phosphorothioate linkage
  modified_base 2: mod_base = OTHER; note = 2'-O-methoxyethyl modified 5-methyl cytosine
  modified_base 3: mod_base = OTHER; note = 2'-O-methoxyethyl modified nucleotide with phosphorothioate linkage
  modified_base 4: mod_base = OTHER; note = 2'-O-methoxyethyl modified 5-methyl cytosine with phosphorothioate linkage
  modified_base 5: mod_base = OTHER; note = 2'-O-methoxyethyl modified thymine with phosphorothioate linkage
  modified_base 6: mod_base = OTHER; note = 2'-O-methoxyethyl modified thymine with phosphorothioate linkage
  modified_base 7: mod_base = OTHER; note = 2'-O-methoxyethyl modified thymine with phosphorothioate linkage
  modified_base 8: mod_base = OTHER; note = 2'-O-methoxyethyl modified 5-methyl cytosine with phosphorothioate linkage
  modified_base 9: mod_base = OTHER; note = 2'-O-methoxyethyl modified nucleotide with phosphorothioate linkage
  modified_base 10: mod_base = OTHER; note = 2'-O-methoxyethyl modified thymine with phosphorothioate linkage
  modified_base 11: mod_base = OTHER; note = 2'-O-methoxyethyl modified nucleotide with phosphorothioate linkage
  modified_base 12: mod_base = OTHER; note = 2'-O-methoxyethyl modified nucleotide with phosphorothioate linkage
  modified_base 13: mod_base = OTHER; note = 2'-O-methoxyethyl modified thymine with phosphorothioate linkage
  modified_base 14: mod_base = OTHER; note = 2'-O-methoxyethyl modified nucleotide with phosphorothioate linkage
  modified_base 15: mod_base = OTHER; note = 2'-O-methoxyethyl modified 5-methyl cytosine
  modified_base 16: mod_base = OTHER; note = 2'-O-methoxyethyl modified thymine with phosphorothioate linkage
  modified_base 17: mod_base = OTHER; note = 2'-O-methoxyethyl modified nucleotide with phosphorothioate linkage
  modified_base 18: mod_base = OTHER; note = 2'-O-methoxyethyl modified nucleotide
tcactttcataatgctgg

SEQ ID NO: 150 - RNA, 18 nt, synthetic construct
  source 1..18: mol_type = other RNA
  modified_base 1: mod_base = OTHER; note = 2'-O-methoxyethyl modified thymine with phosphorothioate linkage
  modified_base 2: mod_base = OTHER; note = 2'-O-methoxyethyl modified 5-methyl cytosine
  modified_base 3: mod_base = OTHER; note = 2'-O-methoxyethyl modified nucleotide with phosphorothioate linkage
  modified_base 4: mod_base = OTHER; note = 2'-O-methoxyethyl modified 5-methyl cytosine with phosphorothioate linkage
  modified_base 5: mod_base = OTHER; note = 2'-O-methoxyethyl modified thymine with phosphorothioate linkage
  modified_base 6: mod_base = OTHER; note = 2'-O-methoxyethyl modified thymine with phosphorothioate linkage
  modified_base 7: mod_base = OTHER; note = 2'-O-methoxyethyl modified thymine with phosphorothioate linkage
  modified_base 8: mod_base = OTHER; note = 2'-O-methoxyethyl modified 5-methyl cytosine with phosphorothioate linkage
  modified_base 9: mod_base = OTHER; note = 2'-O-methoxyethyl modified nucleotide
  modified_base 10: mod_base = OTHER; note = 2'-O-methoxyethyl modified thymine with phosphorothioate linkage
  modified_base 11: mod_base = OTHER; note = 2'-O-methoxyethyl modified nucleotide with phosphorothioate linkage
  modified_base 12: mod_base = OTHER; note = 2'-O-methoxyethyl modified nucleotide with phosphorothioate linkage
  modified_base 13: mod_base = OTHER; note = 2'-O-methoxyethyl modified thymine with phosphorothioate linkage
  modified_base 14: mod_base = OTHER; note = 2'-O-methoxyethyl modified nucleotide with phosphorothioate linkage
  modified_base 15: mod_base = OTHER; note = 2'-O-methoxyethyl modified 5-methyl cytosine with phosphorothioate linkage
  modified_base 16: mod_base = OTHER; note = 2'-O-methoxyethyl modified thymine with phosphorothioate linkage
  modified_base 17: mod_base = OTHER; note = 2'-O-methoxyethyl modified nucleotide with phosphorothioate linkage
  modified_base 18: mod_base = OTHER; note = 2'-O-methoxyethyl modified nucleotide
tcactttcataatgctgg

SEQ ID NO: 151 - RNA, 18 nt, synthetic construct
  source 1..18: mol_type = other RNA
  modified_base 1: mod_base = OTHER; note = 2'-O-methoxyethyl modified thymine with phosphorothioate linkage
  modified_base 2: mod_base = OTHER; note = 2'-O-methoxyethyl modified 5-methyl cytosine
  modified_base 3: mod_base = OTHER; note = 2'-O-methoxyethyl modified nucleotide with phosphorothioate linkage
  modified_base 4: mod_base = OTHER; note = 2'-O-methoxyethyl modified 5-methyl cytosine
  modified_base 5: mod_base = OTHER; note = 2'-O-methoxyethyl modified thymine with phosphorothioate linkage
  modified_base 6: mod_base = OTHER; note = 2'-O-methoxyethyl modified thymine with phosphorothioate linkage
  modified_base 7: mod_base = OTHER; note = 2'-O-methoxyethyl modified thymine with phosphorothioate linkage
  modified_base 8: mod_base = OTHER; note = 2'-O-methoxyethyl modified 5-methyl cytosine with phosphorothioate linkage
  modified_base 9: mod_base = OTHER; note = 2'-O-methoxyethyl modified nucleotide with phosphorothioate linkage
  modified_base 10: mod_base = OTHER; note = 2'-O-methoxyethyl modified thymine with phosphorothioate linkage
  modified_base 11: mod_base = OTHER; note = 2'-O-methoxyethyl modified nucleotide with phosphorothioate linkage
  modified_base 12: mod_base = OTHER; note = 2'-O-methoxyethyl modified nucleotide with phosphorothioate linkage
  modified_base 13: mod_base = OTHER; note = 2'-O-methoxyethyl modified thymine with phosphorothioate linkage
  modified_base 14: mod_base = OTHER; note = 2'-O-methoxyethyl modified nucleotide with phosphorothioate linkage
  modified_base 15: mod_base = OTHER; note = 2'-O-methoxyethyl modified 5-methyl cytosine with phosphorothioate linkage
  modified_base 16: mod_base = OTHER; note = 2'-O-methoxyethyl modified thymine with phosphorothioate linkage
  modified_base 17: mod_base = OTHER; note = 2'-O-methoxyethyl modified nucleotide with phosphorothioate linkage
  modified_base 18: mod_base = OTHER; note = 2'-O-methoxyethyl modified nucleotide
tcactttcataatgctgg

SEQ ID NO: 152 - RNA, 18 nt, synthetic construct
  source 1..18: mol_type = other RNA
  modified_base 1: mod_base = OTHER; note = 2'-O-methoxyethyl modified thymine with phosphorothioate linkage
  modified_base 2: mod_base = OTHER; note = 2'-O-methoxyethyl modified 5-methyl cytosine
  modified_base 3: mod_base = OTHER; note = 2'-O-methoxyethyl modified nucleotide
  modified_base 4: mod_base = OTHER; note = 2'-O-methoxyethyl modified 5-methyl cytosine with phosphorothioate linkage
  modified_base 5: mod_base = OTHER; note = 2'-O-methoxyethyl modified thymine with phosphorothioate linkage
  modified_base 6: mod_base = OTHER; note = 2'-O-methoxyethyl modified thymine with phosphorothioate linkage
  modified_base 7: mod_base = OTHER; note = 2'-O-methoxyethyl modified thymine with phosphorothioate linkage
  modified_base 8: mod_base = OTHER; note = 2'-O-methoxyethyl modified 5-methyl cytosine with phosphorothioate linkage
  modified_base 9: mod_base = OTHER; note = 2'-O-methoxyethyl modified nucleotide with phosphorothioate linkage
  modified_base 10: mod_base = OTHER; note = 2'-O-methoxyethyl modified thymine with phosphorothioate linkage
  modified_base 11: mod_base = OTHER; note = 2'-O-methoxyethyl modified nucleotide with phosphorothioate linkage
  modified_base 12: mod_base = OTHER; note = 2'-O-methoxyethyl modified nucleotide with phosphorothioate linkage
  modified_base 13: mod_base = OTHER; note = 2'-O-methoxyethyl modified thymine with phosphorothioate linkage
  modified_base 14: mod_base = OTHER; note = 2'-O-methoxyethyl modified nucleotide with phosphorothioate linkage
  modified_base 15: mod_base = OTHER; note = 2'-O-methoxyethyl modified 5-methyl cytosine with phosphorothioate linkage
  modified_base 16: mod_base = OTHER; note = 2'-O-methoxyethyl modified thymine with phosphorothioate linkage
  modified_base 17: mod_base = OTHER; note = 2'-O-methoxyethyl modified nucleotide with phosphorothioate linkage
  modified_base 18: mod_base = OTHER; note = 2'-O-methoxyethyl modified nucleotide
tcactttcataatgctgg

SEQ ID NO: 153 - RNA, 19 nt, synthetic construct
  source 1..19: mol_type = other RNA
  modified_base 1: mod_base = OTHER; note = 2'-O-methoxyethyl modified thymine with phosphorothioate linkage
  modified_base 2: mod_base = OTHER; note = 2'-O-methoxyethyl modified thymine with phosphorothioate linkage
  modified_base 3: mod_base = OTHER; note = 2'-O-methoxyethyl modified 5-methyl cytosine with phosphorothioate linkage
  modified_base 4: mod_base = OTHER; note = 2'-O-methoxyethyl modified nucleotide with phosphorothioate linkage
  modified_base 5: mod_base = OTHER; note = 2'-O-methoxyethyl modified 5-methyl cytosine with phosphorothioate linkage
  modified_base 6: mod_base = OTHER; note = 2'-O-methoxyethyl modified thymine with phosphorothioate linkage
  modified_base 7: mod_base = OTHER; note = 2'-O-methoxyethyl modified thymine with phosphorothioate linkage
  modified_base 8: mod_base = OTHER; note = 2'-O-methoxyethyl modified thymine with phosphorothioate linkage
  modified_base 9: mod_base = OTHER; note = 2'-O-methoxyethyl modified 5-methyl cytosine with phosphorothioate linkage
  modified_base 10: mod_base = OTHER; note = 2'-O-methoxyethyl modified nucleotide with phosphorothioate linkage
  modified_base 11: mod_base = OTHER; note = 2'-O-methoxyethyl modified thymine with phosphorothioate linkage
  modified_base 12: mod_base = OTHER; note = 2'-O-methoxyethyl modified nucleotide with phosphorothioate linkage
  modified_base 13: mod_base = OTHER; note = 2'-O-methoxyethyl modified nucleotide with phosphorothioate linkage
  modified_base 14: mod_base = OTHER; note = 2'-O-methoxyethyl modified thymine with phosphorothioate linkage
  modified_base 15: mod_base = OTHER; note = 2'-O-methoxyethyl modified nucleotide with phosphorothioate linkage
  modified_base 16: mod_base = OTHER; note = 2'-O-methoxyethyl modified 5-methyl cytosine
  modified_base 17: mod_base = OTHER; note = 2'-O-methoxyethyl modified thymine with phosphorothioate linkage
  modified_base 18: mod_base = OTHER; note = 2'-O-methoxyethyl modified nucleotide with phosphorothioate linkage
  modified_base 19: mod_base = OTHER; note = 2'-O-methoxyethyl modified nucleotide
ttcactttcataatgctgg

SEQ ID NO: 154 - RNA, 19 nt, synthetic construct
  source 1..19: mol_type = other RNA
  modified_base 1: mod_base = OTHER; note = 2'-O-methoxyethyl modified thymine with phosphorothioate linkage
  modified_base 2: mod_base = OTHER; note = 2'-O-methoxyethyl modified thymine with phosphorothioate linkage
  modified_base 3: mod_base = OTHER; note = 2'-O-methoxyethyl modified 5-methyl cytosine with phosphorothioate linkage
  modified_base 4: mod_base = OTHER; note = 2'-O-methoxyethyl modified nucleotide with phosphorothioate linkage
  modified_base 5: mod_base = OTHER; note = 2'-O-methoxyethyl modified 5-methyl cytosine with phosphorothioate linkage
  modified_base 6: mod_base = OTHER; note = 2'-O-methoxyethyl modified thymine with phosphorothioate linkage
  modified_base 7: mod_base = OTHER; note = 2'-O-methoxyethyl modified thymine with phosphorothioate linkage
  modified_base 8: mod_base = OTHER; note = 2'-O-methoxyethyl modified thymine with phosphorothioate linkage
  modified_base 9: mod_base = OTHER; note = 2'-O-methoxyethyl modified 5-methyl cytosine with phosphorothioate linkage
  modified_base 10: mod_base = OTHER; note = 2'-O-methoxyethyl modified nucleotide with phosphorothioate linkage
  modified_base 11: mod_base = OTHER; note = 2'-O-methoxyethyl modified thymine with phosphorothioate linkage
  modified_base 12: mod_base = OTHER; note = 2'-O-methoxyethyl modified nucleotide with phosphorothioate linkage
  modified_base 13: mod_base = OTHER; note = 2'-O-methoxyethyl modified nucleotide with phosphorothioate linkage
  modified_base 14: mod_base = OTHER; note = 2'-O-methoxyethyl modified thymine
  modified_base 15: mod_base = OTHER; note = 2'-O-methoxyethyl modified nucleotide with phosphorothioate linkage
  modified_base 16: mod_base = OTHER; note = 2'-O-methoxyethyl modified 5-methyl cytosine
  modified_base 17: mod_base = OTHER; note = 2'-O-methoxyethyl modified thymine with phosphorothioate linkage
  modified_base 18: mod_base = OTHER; note = 2'-O-methoxyethyl modified nucleotide with phosphorothioate linkage
  modified_base 19: mod_base = OTHER; note = 2'-O-methoxyethyl modified nucleotide
ttcactttcataatgctgg

SEQ ID NO: 155 - RNA, 19 nt, synthetic construct
  source 1..19: mol_type = other RNA
  modified_base 1: mod_base = OTHER; note = 2'-O-methoxyethyl modified thymine with phosphorothioate linkage
  modified_base 2: mod_base = OTHER; note = 2'-O-methoxyethyl modified thymine with phosphorothioate linkage
  modified_base 3: mod_base = OTHER; note = 2'-O-methoxyethyl modified 5-methyl cytosine with phosphorothioate linkage
  modified_base 4: mod_base = OTHER; note = 2'-O-methoxyethyl modified nucleotide with phosphorothioate linkage
  modified_base 5: mod_base = OTHER; note = 2'-O-methoxyethyl modified 5-methyl cytosine with phosphorothioate linkage
  modified_base 6: mod_base = OTHER; note = 2'-O-methoxyethyl modified thymine with phosphorothioate linkage
  modified_base 7: mod_base = OTHER; note = 2'-O-methoxyethyl modified thymine with phosphorothioate linkage
  modified_base 8: mod_base = OTHER; note = 2'-O-methoxyethyl modified thymine with phosphorothioate linkage
  modified_base 9: mod_base = OTHER; note = 2'-O-methoxyethyl modified 5-methyl cytosine
  modified_base 10: mod_base = OTHER; note = 2'-O-methoxyethyl modified nucleotide with phosphorothioate linkage
  modified_base 11: mod_base = OTHER; note = 2'-O-methoxyethyl modified thymine with phosphorothioate linkage
  modified_base 12: mod_base = OTHER; note = 2'-O-methoxyethyl modified nucleotide with phosphorothioate linkage
  modified_base 13: mod_base = OTHER; note = 2'-O-methoxyethyl modified nucleotide with phosphorothioate linkage
  modified_base 14: mod_base = OTHER; note = 2'-O-methoxyethyl modified thymine with phosphorothioate linkage
  modified_base 15: mod_base = OTHER; note = 2'-O-methoxyethyl modified nucleotide with phosphorothioate linkage
  modified_base 16: mod_base = OTHER; note = 2'-O-methoxyethyl modified 5-methyl cytosine with phosphorothioate linkage
  modified_base 17: mod_base = OTHER; note = 2'-O-methoxyethyl modified thymine with phosphorothioate linkage
  modified_base 18: mod_base = OTHER; note = 2'-O-methoxyethyl modified nucleotide with phosphorothioate linkage
  modified_base 19: mod_base = OTHER; note = 2'-O-methoxyethyl modified nucleotide
ttcactttcataatgctgg

SEQ ID NO: 156 - RNA, 19 nt, synthetic construct
  source 1..19: mol_type = other RNA
  modified_base 1: mod_base = OTHER; note = 2'-O-methoxyethyl modified thymine with phosphorothioate linkage
  modified_base 2: mod_base = OTHER; note = 2'-O-methoxyethyl modified thymine with phosphorothioate linkage
  modified_base 3: mod_base = OTHER; note = 2'-O-methoxyethyl modified 5-methyl cytosine with phosphorothioate linkage
  modified_base 4: mod_base = OTHER; note = 2'-O-methoxyethyl modified nucleotide with phosphorothioate linkage
  modified_base 5: mod_base = OTHER; note = 2'-O-methoxyethyl modified 5-methyl cytosine with phosphorothioate linkage
  modified_base 6: mod_base = OTHER; note = 2'-O-methoxyethyl modified thymine with phosphorothioate linkage
  modified_base 7: mod_base = OTHER; note = 2'-O-methoxyethyl modified thymine with phosphorothioate linkage
  modified_base 8: mod_base = OTHER; note = 2'-O-methoxyethyl modified thymine with phosphorothioate linkage
  modified_base 9: mod_base = OTHER; note = 2'-O-methoxyethyl modified 5-methyl cytosine
  modified_base 10: mod_base = OTHER; note = 2'-O-methoxyethyl modified nucleotide with phosphorothioate linkage
  modified_base 11: mod_base = OTHER; note = 2'-O-methoxyethyl modified thymine with phosphorothioate linkage
  modified_base 12: mod_base = OTHER; note = 2'-O-methoxyethyl modified nucleotide with phosphorothioate linkage
  modified_base 13: mod_base = OTHER; note = 2'-O-methoxyethyl modified nucleotide with phosphorothioate linkage
  modified_base 14: mod_base = OTHER; note = 2'-O-methoxyethyl modified thymine with phosphorothioate linkage
  modified_base 15: mod_base = OTHER; note = 2'-O-methoxyethyl modified nucleotide with phosphorothioate linkage
  modified_base 16: mod_base = OTHER; note = 2'-O-methoxyethyl modified 5-methyl cytosine
  modified_base 17: mod_base = OTHER; note = 2'-O-methoxyethyl modified thymine with phosphorothioate linkage
  modified_base 18: mod_base = OTHER; note = 2'-O-methoxyethyl modified nucleotide with phosphorothioate linkage
  modified_base 19: mod_base = OTHER; note = 2'-O-methoxyethyl modified nucleotide
ttcactttcataatgctgg

SEQ ID NO: 157 - RNA, 19 nt, synthetic construct
  source 1..19: mol_type = other RNA
  modified_base 1: mod_base = OTHER; note = 2'-O-methoxyethyl modified thymine with phosphorothioate linkage
  modified_base 2: mod_base = OTHER; note = 2'-O-methoxyethyl modified thymine
  modified_base 3: mod_base = OTHER; note = 2'-O-methoxyethyl modified 5-methyl cytosine with phosphorothioate linkage
  modified_base 4: mod_base = OTHER; note = 2'-O-methoxyethyl modified nucleotide with phosphorothioate linkage
  modified_base 5: mod_base = OTHER; note = 2'-O-methoxyethyl modified 5-methyl cytosine with phosphorothioate linkage
  modified_base 6: mod_base = OTHER; note = 2'-O-methoxyethyl modified thymine with phosphorothioate linkage
  modified_base 7: mod_base = OTHER; note = 2'-O-methoxyethyl modified thymine with phosphorothioate linkage
  modified_base 8: mod_base = OTHER; note = 2'-O-methoxyethyl modified thymine with phosphorothioate linkage
  modified_base 9: mod_base = OTHER; note = 2'-O-methoxyethyl modified 5-methyl cytosine with phosphorothioate linkage
  modified_base 10: mod_base = OTHER; note = 2'-O-methoxyethyl modified nucleotide with phosphorothioate linkage
  modified_base 11: mod_base = OTHER; note = 2'-O-methoxyethyl modified thymine with phosphorothioate linkage
  modified_base 12: mod_base = OTHER; note = 2'-O-methoxyethyl modified nucleotide with phosphorothioate linkage
  modified_base 13: mod_base = OTHER; note = 2'-O-methoxyethyl modified nucleotide with phosphorothioate linkage
  modified_base 14: mod_base = OTHER; note = 2'-O-methoxyethyl modified thymine with phosphorothioate linkage
  modified_base 15: mod_base = OTHER; note = 2'-O-methoxyethyl modified nucleotide with phosphorothioate linkage
  modified_base 16: mod_base = OTHER; note = 2'-O-methoxyethyl modified 5-methyl cytosine with phosphorothioate linkage
  modified_base 17: mod_base = OTHER; note = 2'-O-methoxyethyl modified thymine with phosphorothioate linkage
  modified_base 18: mod_base = OTHER; note = 2'-O-methoxyethyl modified nucleotide with phosphorothioate linkage
  modified_base 19: mod_base = OTHER; note = 2'-O-methoxyethyl modified nucleotide
ttcactttcataatgctgg

SEQ ID NO: 158 - RNA, 19 nt, synthetic construct
  source 1..19: mol_type = other RNA
  modified_base 1: mod_base = OTHER; note = 2'-O-methoxyethyl modified thymine with phosphorothioate linkage
  modified_base 2: mod_base = OTHER; note = 2'-O-methoxyethyl modified thymine
  modified_base 3: mod_base = OTHER; note = 2'-O-methoxyethyl modified 5-methyl cytosine with phosphorothioate linkage
  modified_base 4: mod_base = OTHER; note = 2'-O-methoxyethyl modified nucleotide with phosphorothioate linkage
  modified_base 5: mod_base = OTHER; note = 2'-O-methoxyethyl modified 5-methyl cytosine with phosphorothioate linkage
  modified_base 6: mod_base = OTHER; note = 2'-O-methoxyethyl modified thymine with phosphorothioate linkage
  modified_base 7: mod_base = OTHER; note = 2'-O-methoxyethyl modified thymine with phosphorothioate linkage
  modified_base 8: mod_base = OTHER; note = 2'-O-methoxyethyl modified thymine with phosphorothioate linkage
  modified_base 9: mod_base = OTHER; note = 2'-O-methoxyethyl modified 5-methyl cytosine with phosphorothioate linkage
  modified_base 10: mod_base = OTHER; note = 2'-O-methoxyethyl modified nucleotide with phosphorothioate linkage
  modified_base 11: mod_base = OTHER; note = 2'-O-methoxyethyl modified thymine with phosphorothioate linkage
  modified_base 12: mod_base = OTHER; note = 2'-O-methoxyethyl modified nucleotide with phosphorothioate linkage
  modified_base 13: mod_base = OTHER; note = 2'-O-methoxyethyl modified nucleotide with phosphorothioate linkage
  modified_base 14: mod_base = OTHER; note = 2'-O-methoxyethyl modified thymine with phosphorothioate linkage
  modified_base 15: mod_base = OTHER; note = 2'-O-methoxyethyl modified nucleotide with phosphorothioate linkage
  modified_base 16: mod_base = OTHER; note = 2'-O-methoxyethyl modified 5-methyl cytosine
  modified_base 17: mod_base = OTHER; note = 2'-O-methoxyethyl modified thymine with phosphorothioate linkage
  modified_base 18: mod_base = OTHER; note = 2'-O-methoxyethyl modified nucleotide with phosphorothioate linkage
  modified_base 19: mod_base = OTHER; note = 2'-O-methoxyethyl modified nucleotide
ttcactttcataatgctgg

SEQ ID NO: 159 - RNA, 19 nt, synthetic construct
  source 1..19: mol_type = other RNA
  modified_base 1: mod_base = OTHER; note = 2'-O-methoxyethyl modified thymine with phosphorothioate linkage
  modified_base 2: mod_base = OTHER; note = 2'-O-methoxyethyl modified thymine
  modified_base 3: mod_base = OTHER; note = 2'-O-methoxyethyl modified 5-methyl cytosine with phosphorothioate linkage
  modified_base 4: mod_base = OTHER; note = 2'-O-methoxyethyl modified nucleotide with phosphorothioate linkage
  modified_base 5: mod_base = OTHER; note = 2'-O-methoxyethyl modified 5-methyl cytosine with phosphorothioate linkage
  modified_base 6: mod_base = OTHER; note = 2'-O-methoxyethyl modified thymine with phosphorothioate linkage
  modified_base 7: mod_base = OTHER; note = 2'-O-methoxyethyl modified thymine with phosphorothioate linkage
  modified_base 8: mod_base = OTHER; note = 2'-O-methoxyethyl modified thymine with phosphorothioate linkage
  modified_base 9: mod_base = OTHER; note = 2'-O-methoxyethyl modified 5-methyl cytosine
  modified_base 10: mod_base = OTHER; note = 2'-O-methoxyethyl modified nucleotide with phosphorothioate linkage
  modified_base 11: mod_base = OTHER; note = 2'-O-methoxyethyl modified thymine with phosphorothioate linkage
  modified_base 12: mod_base = OTHER; note = 2'-O-methoxyethyl modified nucleotide with phosphorothioate linkage
  modified_base 13: mod_base = OTHER; note = 2'-O-methoxyethyl modified nucleotide with phosphorothioate linkage
  modified_base 14: mod_base = OTHER; note = 2'-O-methoxyethyl modified thymine with phosphorothioate linkage
  modified_base 15: mod_base = OTHER; note = 2'-O-methoxyethyl modified nucleotide with phosphorothioate linkage
  modified_base 16: mod_base = OTHER; note = 2'-O-methoxyethyl modified 5-methyl cytosine with phosphorothioate linkage
  modified_base 17: mod_base = OTHER; note = 2'-O-methoxyethyl modified thymine with phosphorothioate linkage
  modified_base 18: mod_base = OTHER; note = 2'-O-methoxyethyl modified nucleotide with phosphorothioate linkage
  modified_base 19: mod_base = OTHER; note = 2'-O-methoxyethyl modified nucleotide
ttcactttcataatgctgg

SEQ ID NO: 160 - RNA, 19 nt, synthetic construct
  source 1..19: mol_type = other RNA
  modified_base 1: mod_base = OTHER; note = 2'-O-methoxyethyl modified thymine with phosphorothioate linkage
  modified_base 2: mod_base = OTHER; note = 2'-O-methoxyethyl modified thymine
  modified_base 3: mod_base = OTHER; note = 2'-O-methoxyethyl modified 5-methyl cytosine with phosphorothioate linkage
  modified_base 4: mod_base = OTHER; note = 2'-O-methoxyethyl modified nucleotide
  modified_base 5: mod_base = OTHER; note = 2'-O-methoxyethyl modified 5-methyl cytosine with phosphorothioate linkage
  modified_base 6: mod_base = OTHER; note = 2'-O-methoxyethyl modified thymine with phosphorothioate linkage
  modified_base 7: mod_base = OTHER; note = 2'-O-methoxyethyl modified thymine with phosphorothioate linkage
  modified_base 8: mod_base = OTHER; note = 2'-O-methoxyethyl modified thymine with phosphorothioate linkage
  modified_base 9: mod_base = OTHER; note = 2'-O-methoxyethyl modified 5-methyl cytosine with phosphorothioate linkage
  modified_base 10: mod_base = OTHER; note = 2'-O-methoxyethyl modified nucleotide with phosphorothioate linkage
  modified_base 11: mod_base = OTHER; note = 2'-O-methoxyethyl modified thymine with phosphorothioate linkage
  modified_base 12: mod_base = OTHER; note = 2'-O-methoxyethyl modified nucleotide with phosphorothioate linkage
  modified_base 13: mod_base = OTHER; note = 2'-O-methoxyethyl modified nucleotide with phosphorothioate linkage
  modified_base 14: mod_base = OTHER; note = 2'-O-methoxyethyl modified thymine with phosphorothioate linkage
  modified_base 15: mod_base = OTHER; note = 2'-O-methoxyethyl modified nucleotide with phosphorothioate linkage
  modified_base 16: mod_base = OTHER; note = 2'-O-methoxyethyl modified 5-methyl cytosine with phosphorothioate linkage
  modified_base 17: mod_base = OTHER; note = 2'-O-methoxyethyl modified thymine with phosphorothioate linkage
  modified_base 18: mod_base = OTHER; note = 2'-O-methoxyethyl modified nucleotide with phosphorothioate linkage
  modified_base 19: mod_base = OTHER; note = 2'-O-methoxyethyl modified nucleotide
ttcactttcataatgctgg

SEQ ID NO: 161 - RNA, 20 nt, synthetic construct
  source 1..20: mol_type = other RNA
  modified_base 1: mod_base = OTHER; note = 2'-O-methoxyethyl modified nucleotide with phosphorothioate linkage
  modified_base 2: mod_base = OTHER; note = 2'-O-methoxyethyl modified thymine with phosphorothioate linkage
  modified_base 3: mod_base = OTHER; note = 2'-O-methoxyethyl modified thymine with phosphorothioate linkage
  modified_base 4: mod_base = OTHER; note = 2'-O-methoxyethyl modified 5-methyl cytosine with phosphorothioate linkage
  modified_base 5: mod_base = OTHER; note = 2'-O-methoxyethyl modified nucleotide with phosphorothioate linkage
  modified_base 6: mod_base = OTHER; note = 2'-O-methoxyethyl modified 5-methyl cytosine with phosphorothioate linkage
  modified_base 7: mod_base = OTHER; note = 2'-O-methoxyethyl modified thymine with phosphorothioate linkage
  modified_base 8: mod_base = OTHER; note = 2'-O-methoxyethyl modified thymine with phosphorothioate linkage
  modified_base 9: mod_base = OTHER; note = 2'-O-methoxyethyl modified thymine with phosphorothioate linkage
  modified_base 10: mod_base = OTHER; note = 2'-O-methoxyethyl modified 5-methyl cytosine with phosphorothioate linkage
  modified_base 11: mod_base = OTHER; note = 2'-O-methoxyethyl modified nucleotide with phosphorothioate linkage
  modified_base 12: mod_base = OTHER; note = 2'-O-methoxyethyl modified thymine with phosphorothioate linkage
  modified_base 13: mod_base = OTHER; note = 2'-O-methoxyethyl modified nucleotide with phosphorothioate linkage
  modified_base 14: mod_base = OTHER; note = 2'-O-methoxyethyl modified nucleotide with phosphorothioate linkage
  modified_base 15: mod_base = OTHER; note = 2'-O-methoxyethyl modified thymine with phosphorothioate linkage
  modified_base 16: mod_base = OTHER; note = 2'-O-methoxyethyl modified nucleotide with phosphorothioate linkage
  modified_base 17: mod_base = OTHER; note = 2'-O-methoxyethyl modified 5-methyl cytosine
  modified_base 18: mod_base = OTHER; note = 2'-O-methoxyethyl modified thymine with phosphorothioate linkage
  modified_base 19: mod_base = OTHER; note = 2'-O-methoxyethyl modified nucleotide with phosphorothioate linkage
  modified_base 20: mod_base = OTHER; note = 2'-O-methoxyethyl modified nucleotide
attcactttcataatgctgg

SEQ ID NO: 162 - RNA, 20 nt, synthetic construct
  source 1..20: mol_type = other RNA
  modified_base 1: mod_base = OTHER; note = 2'-O-methoxyethyl modified nucleotide with phosphorothioate linkage
  modified_base 2: mod_base = OTHER; note = 2'-O-methoxyethyl modified thymine with phosphorothioate linkage
  modified_base 3: mod_base = OTHER; note = 2'-O-methoxyethyl modified thymine with phosphorothioate linkage
  modified_base 4: mod_base = OTHER; note = 2'-O-methoxyethyl modified 5-methyl cytosine with phosphorothioate linkage
  modified_base 5: mod_base = OTHER; note = 2'-O-methoxyethyl modified nucleotide with phosphorothioate linkage
  modified_base 6: mod_base = OTHER; note = 2'-O-methoxyethyl modified 5-methyl cytosine with phosphorothioate linkage
  modified_base 7: mod_base = OTHER; note = 2'-O-methoxyethyl modified thymine with phosphorothioate linkage
  modified_base 8: mod_base = OTHER; note = 2'-O-methoxyethyl modified thymine with phosphorothioate linkage
  modified_base 9: mod_base = OTHER; note = 2'-O-methoxyethyl modified thymine with phosphorothioate linkage
  modified_base 10: mod_base = OTHER; note = 2'-O-methoxyethyl modified 5-methyl cytosine with phosphorothioate linkage
  modified_base 11: mod_base = OTHER; note = 2'-O-methoxyethyl modified nucleotide with phosphorothioate linkage
  modified_base 12: mod_base = OTHER; note = 2'-O-methoxyethyl modified thymine with phosphorothioate linkage
  modified_base 13: mod_base = OTHER; note = 2'-O-methoxyethyl modified nucleotide with phosphorothioate linkage
  modified_base 14: mod_base = OTHER; note = 2'-O-methoxyethyl modified nucleotide with phosphorothioate linkage
  modified_base 15: mod_base = OTHER; note = 2'-O-methoxyethyl modified thymine with phosphorothioate linkage
  modified_base 16: mod_base = OTHER; note = 2'-O-methoxyethyl modified nucleotide
  modified_base 17: mod_base = OTHER; note = 2'-O-methoxyethyl modified 5-methyl cytosine
  modified_base 18: mod_base = OTHER; note = 2'-O-methoxyethyl modified thymine with phosphorothioate linkage
  modified_base 19: mod_base = OTHER; note = 2'-O-methoxyethyl modified nucleotide with phosphorothioate linkage
  modified_base 20: mod_base = OTHER; note = 2'-O-methoxyethyl modified nucleotide
attcactttcataatgctgg

SEQ ID NO: 163 - RNA, 20 nt, synthetic construct
  source 1..20: mol_type = other RNA
  modified_base 1: mod_base = OTHER; note = 2'-O-methoxyethyl modified nucleotide with phosphorothioate linkage
  modified_base 2: mod_base = OTHER; note = 2'-O-methoxyethyl modified thymine with phosphorothioate linkage
  modified_base 3: mod_base = OTHER; note = 2'-O-methoxyethyl modified thymine with phosphorothioate linkage
  modified_base 4: mod_base = OTHER; note = 2'-O-methoxyethyl modified 5-methyl cytosine with phosphorothioate linkage
  modified_base 5: mod_base = OTHER; note = 2'-O-methoxyethyl modified nucleotide with phosphorothioate linkage
  modified_base 6: mod_base = OTHER; note = 2'-O-methoxyethyl modified 5-methyl cytosine with phosphorothioate linkage
  modified_base 7: mod_base = OTHER; note = 2'-O-methoxyethyl modified thymine with phosphorothioate linkage
  modified_base 8: mod_base = OTHER; note = 2'-O-methoxyethyl modified thymine with phosphorothioate linkage
  modified_base 9: mod_base = OTHER; note = 2'-O-methoxyethyl modified thymine with phosphorothioate linkage
  modified_base 10: mod_base = OTHER; note = 2'-O-methoxyethyl modified 5-methyl cytosine with phosphorothioate linkage
  modified_base 11: mod_base = OTHER; note = 2'-O-methoxyethyl modified nucleotide with phosphorothioate linkage
  modified_base 12: mod_base = OTHER; note = 2'-O-methoxyethyl modified thymine with phosphorothioate linkage
  modified_base 13: mod_base = OTHER; note = 2'-O-methoxyethyl modified nucleotide with phosphorothioate linkage
  modified_base 14: mod_base = OTHER; note = 2'-O-methoxyethyl modified nucleotide with phosphorothioate linkage
  modified_base 15: mod_base = OTHER; note = 2'-O-methoxyethyl modified thymine
  modified_base 16: mod_base = OTHER; note = 2'-O-methoxyethyl modified nucleotide with phosphorothioate linkage
  modified_base 17: mod_base = OTHER; note = 2'-O-methoxyethyl modified 5-methyl cytosine
  modified_base 18: mod_base = OTHER; note = 2'-O-methoxyethyl modified thymine with phosphorothioate linkage
  modified_base 19: mod_base = OTHER; note = 2'-O-methoxyethyl modified nucleotide with phosphorothioate linkage
  modified_base 20: mod_base = OTHER; note = 2'-O-methoxyethyl modified nucleotide
attcactttcataatgctgg

SEQ ID NO: 164 - RNA, 20 nt, synthetic construct
  source 1..20: mol_type = other RNA
  modified_base 1: mod_base = OTHER; note = 2'-O-methoxyethyl modified nucleotide with phosphorothioate linkage
  modified_base 2: mod_base = OTHER; note = 2'-O-methoxyethyl modified thymine with phosphorothioate linkage
  modified_base 3: mod_base = OTHER; note = 2'-O-methoxyethyl modified thymine with phosphorothioate linkage
  modified_base 4: mod_base = OTHER; note = 2'-O-methoxyethyl modified 5-methyl cytosine with phosphorothioate linkage
  modified_base 5: mod_base = OTHER; note = 2'-O-methoxyethyl modified nucleotide with phosphorothioate linkage
  modified_base 6: mod_base = OTHER; note = 2'-O-methoxyethyl modified 5-methyl cytosine with phosphorothioate linkage
  modified_base 7: mod_base = OTHER; note = 2'-O-methoxyethyl modified thymine with phosphorothioate linkage
  modified_base 8: mod_base = OTHER; note = 2'-O-methoxyethyl modified thymine with phosphorothioate linkage
  modified_base 9: mod_base = OTHER; note = 2'-O-methoxyethyl modified thymine with phosphorothioate linkage
  modified_base 10: mod_base = OTHER; note = 2'-O-methoxyethyl modified 5-methyl cytosine
  modified_base 11: mod_base = OTHER; note = 2'-O-methoxyethyl modified nucleotide with phosphorothioate linkage
  modified_base 12: mod_base = OTHER; note = 2'-O-methoxyethyl modified thymine with phosphorothioate linkage
  modified_base 13: mod_base = OTHER; note = 2'-O-methoxyethyl modified nucleotide with phosphorothioate linkage
  modified_base 14: mod_base = OTHER; note = 2'-O-methoxyethyl modified nucleotide with phosphorothioate linkage
  modified_base 15: mod_base = OTHER; note = 2'-O-methoxyethyl modified thymine with phosphorothioate linkage
  modified_base 16: mod_base = OTHER; note = 2'-O-methoxyethyl modified nucleotide with phosphorothioate linkage
  modified_base 17: mod_base = OTHER; note = 2'-O-methoxyethyl modified 5-methyl cytosine with phosphorothioate linkage
  modified_base 18: mod_base = OTHER; note = 2'-O-methoxyethyl modified thymine with phosphorothioate linkage
  modified_base 19: mod_base = OTHER; note = 2'-O-methoxyethyl modified nucleotide with phosphorothioate linkage
  modified_base 20: mod_base = OTHER; note = 2'-O-methoxyethyl modified nucleotide
attcactttcataatgctgg

SEQ ID NO: 165 - RNA, 20 nt, synthetic construct
  source 1..20: mol_type = other RNA
  modified_base 1: mod_base = OTHER; note = 2'-O-methoxyethyl modified nucleotide with phosphorothioate linkage
  modified_base 2: mod_base = OTHER; note = 2'-O-methoxyethyl modified thymine with phosphorothioate linkage
  modified_base 3: mod_base = OTHER; note = 2'-O-methoxyethyl modified thymine with phosphorothioate linkage
  modified_base 4: mod_base = OTHER; note = 2'-O-methoxyethyl modified 5-methyl cytosine with phosphorothioate linkage
  modified_base 5: mod_base = OTHER; note = 2'-O-methoxyethyl modified nucleotide with phosphorothioate linkage
  modified_base 6: mod_base = OTHER; note = 2'-O-methoxyethyl modified 5-methyl cytosine with phosphorothioate linkage
  modified_base 7: mod_base = OTHER; note = 2'-O-methoxyethyl modified thymine with phosphorothioate linkage
  modified_base 8: mod_base = OTHER; note = 2'-O-methoxyethyl modified thymine with phosphorothioate linkage
  modified_base 9: mod_base = OTHER; note = 2'-O-methoxyethyl modified thymine with phosphorothioate linkage
  modified_base 10: mod_base = OTHER; note = 2'-O-methoxyethyl modified 5-methyl cytosine
  modified_base 11: mod_base = OTHER; note = 2'-O-methoxyethyl modified nucleotide with phosphorothioate linkage
  modified_base 12: mod_base = OTHER; note = 2'-O-methoxyethyl modified thymine with phosphorothioate linkage
  modified_base 13: mod_base = OTHER; note = 2'-O-methoxyethyl modified nucleotide with phosphorothioate linkage
  modified_base 14: mod_base = OTHER; note = 2'-O-methoxyethyl modified nucleotide with phosphorothioate linkage
  modified_base 15: mod_base = OTHER; note = 2'-O-methoxyethyl modified thymine with phosphorothioate linkage
  modified_base 16: mod_base = OTHER; note = 2'-O-methoxyethyl modified nucleotide with phosphorothioate linkage
  modified_base 17: mod_base = OTHER; note = 2'-O-methoxyethyl modified 5-methyl cytosine
  modified_base 18: mod_base = OTHER; note = 2'-O-methoxyethyl modified thymine with phosphorothioate linkage
  modified_base 19: mod_base = OTHER; note = 2'-O-methoxyethyl modified nucleotide with phosphorothioate linkage
  modified_base 20: mod_base = OTHER; note = 2'-O-methoxyethyl modified nucleotide
attcactttcataatgctgg

SEQ ID NO: 166 - RNA, 20 nt, synthetic construct
  source 1..20: mol_type = other RNA
  modified_base 1: mod_base = OTHER; note = 2'-O-methoxyethyl modified nucleotide with phosphorothioate linkage
  modified_base 2: mod_base = OTHER; note = 2'-O-methoxyethyl modified thymine with phosphorothioate linkage
  modified_base 3: mod_base = OTHER; note = 2'-O-methoxyethyl modified thymine with phosphorothioate linkage
  modified_base 4: mod_base = OTHER; note = 2'-O-methoxyethyl modified 5-methyl cytosine with phosphorothioate linkage
  modified_base 5: mod_base = OTHER; note = 2'-O-methoxyethyl modified nucleotide with phosphorothioate linkage
  modified_base 6: mod_base = OTHER; note = 2'-O-methoxyethyl modified 5-methyl cytosine with phosphorothioate linkage
  modified_base 7: mod_base = OTHER; note = 2'-O-methoxyethyl modified thymine with phosphorothioate linkage
  modified_base 8: mod_base = OTHER; note = 2'-O-methoxyethyl modified thymine with phosphorothioate linkage
  modified_base 9: mod_base = OTHER; note = 2'-O-methoxyethyl modified thymine
  modified_base 10: mod_base = OTHER; note = 2'-O-methoxyethyl modified 5-methyl cytosine
  modified_base 11: mod_base = OTHER; note = 2'-O-methoxyethyl modified nucleotide with phosphorothioate linkage
  modified_base 12: mod_base = OTHER; note = 2'-O-methoxyethyl modified thymine with phosphorothioate linkage
  modified_base 13: mod_base = OTHER; note = 2'-O-methoxyethyl modified nucleotide with phosphorothioate linkage
  modified_base 14: mod_base = OTHER; note = 2'-O-methoxyethyl modified nucleotide with phosphorothioate linkage
  modified_base 15: mod_base = OTHER; note = 2'-O-methoxyethyl modified thymine with phosphorothioate linkage
  modified_base 16: mod_base = OTHER; note = 2'-O-methoxyethyl modified nucleotide with phosphorothioate linkage
  modified_base 17: mod_base = OTHER; note = 2'-O-methoxyethyl modified 5-methyl cytosine with phosphorothioate linkage
  modified_base 18: mod_base = OTHER; note = 2'-O-methoxyethyl modified thymine with phosphorothioate linkage
  modified_base 19: mod_base = OTHER; note = 2'-O-methoxyethyl modified nucleotide with phosphorothioate linkage
  modified_base 20: mod_base = OTHER; note = 2'-O-methoxyethyl modified nucleotide
attcactttcataatgctgg

SEQ ID NO: 167 - RNA, 20 nt, synthetic construct
  source 1..20: mol_type = other RNA
  modified_base 1: mod_base = OTHER; note = 2'-O-methoxyethyl modified nucleotide with phosphorothioate linkage
  modified_base 2: mod_base = OTHER; note = 2'-O-methoxyethyl modified thymine
  modified_base 3: mod_base = OTHER; note = 2'-O-methoxyethyl modified thymine with phosphorothioate linkage
  modified_base 4: mod_base = OTHER; note = 2'-O-methoxyethyl modified 5-methyl cytosine with phosphorothioate linkage
  modified_base 5: mod_base = OTHER; note = 2'-O-methoxyethyl modified nucleotide with phosphorothioate linkage
  modified_base 6: mod_base = OTHER; note = 2'-O-methoxyethyl modified 5-methyl cytosine with phosphorothioate linkage
  modified_base 7: mod_base = OTHER; note = 2'-O-methoxyethyl modified thymine with phosphorothioate linkage
  modified_base 8: mod_base = OTHER; note = 2'-O-methoxyethyl modified thymine with phosphorothioate linkage
  modified_base 9: mod_base = OTHER; note = 2'-O-methoxyethyl modified thymine with phosphorothioate linkage
  modified_base 10: mod_base = OTHER; note = 2'-O-methoxyethyl modified 5-methyl cytosine with phosphorothioate linkage
  modified_base 11: mod_base = OTHER; note = 2'-O-methoxyethyl modified nucleotide with phosphorothioate linkage
  modified_base 12: mod_base = OTHER; note = 2'-O-methoxyethyl modified thymine with phosphorothioate linkage
  modified_base 13: mod_base = OTHER; note = 2'-O-methoxyethyl modified nucleotide with phosphorothioate linkage
  modified_base 14: mod_base = OTHER; note = 2'-O-methoxyethyl modified nucleotide with phosphorothioate linkage
  modified_base 15: mod_base = OTHER; note = 2'-O-methoxyethyl modified thymine with phosphorothioate linkage
  modified_base 16: mod_base = OTHER; note = 2'-O-methoxyethyl modified nucleotide with phosphorothioate linkage
  modified_base 17: mod_base = OTHER; note = 2'-O-methoxyethyl modified 5-methyl cytosine with phosphorothioate linkage
  modified_base 18: mod_base = OTHER; note = 2'-O-methoxyethyl modified thymine with phosphorothioate linkage
  modified_base 19: mod_base = OTHER; note = 2'-O-methoxyethyl modified nucleotide with phosphorothioate linkage
  modified_base 20: mod_base = OTHER; note = 2'-O-methoxyethyl modified nucleotide
attcactttcataatgctgg

SEQ ID NO: 168 - RNA, 20 nt, synthetic construct
  source 1..20: mol_type = other RNA
  modified_base 1: mod_base = OTHER; note = 2'-O-methoxyethyl modified nucleotide with phosphorothioate linkage
  modified_base 2: mod_base = OTHER; note = 2'-O-methoxyethyl modified thymine
  modified_base 3: mod_base = OTHER; note = 2'-O-methoxyethyl modified thymine with phosphorothioate linkage
  modified_base 4: mod_base = OTHER; note = 2'-O-methoxyethyl modified 5-methyl cytosine with phosphorothioate linkage
  modified_base 5: mod_base = OTHER; note = 2'-O-methoxyethyl modified nucleotide with phosphorothioate linkage
  modified_base 6: mod_base = OTHER; note = 2'-O-methoxyethyl modified 5-methyl cytosine with phosphorothioate linkage
  modified_base 7: mod_base = OTHER; note = 2'-O-methoxyethyl modified thymine with phosphorothioate linkage
  modified_base 8: mod_base = OTHER; note = 2'-O-methoxyethyl modified thymine with phosphorothioate linkage
  modified_base 9: mod_base = OTHER; note = 2'-O-methoxyethyl modified thymine with phosphorothioate linkage
  modified_base 10: mod_base = OTHER; note = 2'-O-methoxyethyl modified 5-methyl cytosine with phosphorothioate linkage
  modified_base 11: mod_base = OTHER; note = 2'-O-methoxyethyl modified nucleotide with phosphorothioate linkage
  modified_base 12: mod_base = OTHER; note = 2'-O-methoxyethyl modified thymine with phosphorothioate linkage
  modified_base 13: mod_base = OTHER; note = 2'-O-methoxyethyl modified nucleotide with phosphorothioate linkage
  modified_base 14: mod_base = OTHER; note = 2'-O-methoxyethyl modified nucleotide with phosphorothioate linkage
  modified_base 15: mod_base = OTHER; note = 2'-O-methoxyethyl modified thymine with phosphorothioate linkage
  modified_base 16: mod_base = OTHER; note = 2'-O-methoxyethyl modified nucleotide with phosphorothioate linkage
  modified_base 17: mod_base = OTHER; note = 2'-O-methoxyethyl modified 5-methyl cytosine
  modified_base 18: mod_base = OTHER; note = 2'-O-methoxyethyl modified thymine with phosphorothioate linkage
  modified_base 19: mod_base = OTHER; note = 2'-O-methoxyethyl modified nucleotide with phosphorothioate linkage
  modified_base 20: mod_base = OTHER; note = 2'-O-methoxyethyl modified nucleotide
attcactttcataatgctgg

SEQ ID NO: 169 - RNA, 20 nt, synthetic construct
  source 1..20: mol_type = other RNA
  modified_base 1: mod_base = OTHER; note = 2'-O-methoxyethyl modified nucleotide with phosphorothioate linkage
  modified_base 2: mod_base = OTHER; note = 2'-O-methoxyethyl modified thymine
  modified_base 3: mod_base = OTHER; note = 2'-O-methoxyethyl modified thymine with phosphorothioate linkage
  modified_base 4: mod_base = OTHER; note = 2'-O-methoxyethyl modified 5-methyl cytosine with phosphorothioate linkage
  modified_base 5: mod_base = OTHER; note = 2'-O-methoxyethyl modified nucleotide with phosphorothioate linkage
  modified_base 6: mod_base = OTHER; note = 2'-O-methoxyethyl modified 5-methyl cytosine with phosphorothioate linkage
  modified_base 7: mod_base = OTHER; note = 2'-O-methoxyethyl modified thymine with phosphorothioate linkage
  modified_base 8: mod_base = OTHER; note = 2'-O-methoxyethyl modified thymine with phosphorothioate linkage
  modified_base 9: mod_base = OTHER; note = 2'-O-methoxyethyl modified thymine with phosphorothioate linkage
  modified_base 10: mod_base = OTHER; note = 2'-O-methoxyethyl modified 5-methyl cytosine
  modified_base 11: mod_base = OTHER; note = 2'-O-methoxyethyl modified nucleotide with phosphorothioate linkage
  modified_base 12: mod_base = OTHER; note = 2'-O-methoxyethyl modified thymine with phosphorothioate linkage
  modified_base 13: mod_base = OTHER; note = 2'-O-methoxyethyl modified nucleotide with phosphorothioate linkage
  modified_base 14: mod_base = OTHER; note = 2'-O-methoxyethyl modified nucleotide with phosphorothioate linkage
  modified_base 15: mod_base = OTHER; note = 2'-O-methoxyethyl modified thymine with phosphorothioate linkage
  modified_base 16: mod_base = OTHER; note = 2'-O-methoxyethyl modified nucleotide with phosphorothioate linkage
  modified_base 17: mod_base = OTHER; note = 2'-O-methoxyethyl modified 5-methyl cytosine with phosphorothioate linkage
  modified_base 18: mod_base = OTHER; note = 2'-O-methoxyethyl modified thymine with phosphorothioate linkage
  modified_base 19: mod_base = OTHER; note = 2'-O-methoxyethyl modified nucleotide with phosphorothioate linkage
  modified_base 20: mod_base = OTHER; note = 2'-O-methoxyethyl modified nucleotide
attcactttcataatgctgg

SEQ ID NO: 170 - RNA, 20 nt, synthetic construct
  source 1..20: mol_type = other RNA
  modified_base 1: mod_base = OTHER; note = 2'-O-methoxyethyl modified nucleotide with phosphorothioate linkage
  modified_base 2: mod_base = OTHER; note = 2'-O-methoxyethyl modified thymine
  modified_base 3: mod_base = OTHER; note = 2'-O-methoxyethyl modified thymine with phosphorothioate linkage
  modified_base 4: mod_base = OTHER; note = 2'-O-methoxyethyl modified 5-methyl cytosine
  modified_base 5: mod_base = OTHER; note = 2'-O-methoxyethyl modified nucleotide with phosphorothioate linkage
  modified_base 6: mod_base = OTHER; note = 2'-O-methoxyethyl modified 5-methyl cytosine with phosphorothioate linkage
  modified_base 7: mod_base = OTHER; note = 2'-O-methoxyethyl modified thymine with phosphorothioate linkage
  modified_base 8: mod_base = OTHER; note = 2'-O-methoxyethyl modified thymine with phosphorothioate linkage
  modified_base 9: mod_base = OTHER; note = 2'-O-methoxyethyl modified thymine with phosphorothioate linkage
  modified_base 10: mod_base = OTHER; note = 2'-O-methoxyethyl modified 5-methyl cytosine with phosphorothioate linkage
  modified_base 11: mod_base = OTHER; note = 2'-O-methoxyethyl modified nucleotide with phosphorothioate linkage
  modified_base 12: mod_base = OTHER; note = 2'-O-methoxyethyl modified thymine with phosphorothioate linkage
  modified_base 13: mod_base = OTHER; note = 2'-O-methoxyethyl modified nucleotide with phosphorothioate linkage
  modified_base 14: mod_base = OTHER; note = 2'-O-methoxyethyl modified nucleotide with phosphorothioate linkage
  modified_base 15: mod_base = OTHER; note = 2'-O-methoxyethyl modified thymine with phosphorothioate linkage
  modified_base 16: mod_base = OTHER; note = 2'-O-methoxyethyl modified nucleotide with phosphorothioate linkage
  modified_base 17: mod_base = OTHER; note = 2'-O-methoxyethyl modified 5-methyl cytosine with phosphorothioate linkage
  modified_base 18: mod_base = OTHER; note = 2'-O-methoxyethyl modified thymine with phosphorothioate linkage
  modified_base 19: mod_base = OTHER; note = 2'-O-methoxyethyl modified nucleotide with phosphorothioate linkage
  modified_base 20: mod_base = OTHER; note = 2'-O-methoxyethyl modified nucleotide
attcactttcataatgctgg

SEQ ID NO: 171 - RNA, 20 nt, synthetic construct
  source 1..20: mol_type = other RNA
  modified_base 1: mod_base = OTHER; note = 2'-O-methoxyethyl modified nucleotide with phosphorothioate linkage
  modified_base 2: mod_base = OTHER; note = 2'-O-methoxyethyl modified thymine
  modified_base 3: mod_base = OTHER; note = 2'-O-methoxyethyl modified thymine
  modified_base 4: mod_base = OTHER; note = 2'-O-methoxyethyl modified 5-methyl cytosine with phosphorothioate linkage
  modified_base 5: mod_base = OTHER; note = 2'-O-methoxyethyl modified nucleotide with phosphorothioate linkage
  modified_base 6: mod_base = OTHER; note = 2'-O-methoxyethyl modified 5-methyl cytosine with phosphorothioate linkage
  modified_base 7: mod_base = OTHER; note = 2'-O-methoxyethyl modified thymine with phosphorothioate linkage
  modified_base 8: mod_base = OTHER; note = 2'-O-methoxyethyl modified thymine with phosphorothioate linkage
  modified_base 9: mod_base = OTHER; note = 2'-O-methoxyethyl modified thymine with phosphorothioate linkage
  modified_base 10: mod_base = OTHER; note = 2'-O-methoxyethyl modified 5-methyl cytosine with phosphorothioate linkage
  modified_base 11: mod_base = OTHER; note = 2'-O-methoxyethyl modified nucleotide with phosphorothioate linkage
  modified_base 12: mod_base = OTHER; note = 2'-O-methoxyethyl modified thymine with phosphorothioate linkage
  modified_base 13: mod_base = OTHER; note = 2'-O-methoxyethyl modified nucleotide with phosphorothioate linkage
  modified_base 14: mod_base = OTHER; note = 2'-O-methoxyethyl modified nucleotide with phosphorothioate linkage
  modified_base 15: mod_base = OTHER; note = 2'-O-methoxyethyl modified thymine with phosphorothioate linkage
  modified_base 16: mod_base = OTHER; note = 2'-O-methoxyethyl modified nucleotide with phosphorothioate linkage
  modified_base 17: mod_base = OTHER; note = 2'-O-methoxyethyl modified 5-methyl cytosine with phosphorothioate linkage
  modified_base 18: mod_base = OTHER; note = 2'-O-methoxyethyl modified thymine with phosphorothioate linkage
  modified_base 19: mod_base = OTHER; note = 2'-O-methoxyethyl modified nucleotide with phosphorothioate linkage
  modified_base 20: mod_base = OTHER; note = 2'-O-methoxyethyl modified nucleotide
attcactttcataatgctgg

SEQ ID NO: 172 - RNA, 19 nt, synthetic construct
  source 1..19: mol_type = other RNA
  modified_base 1: mod_base = OTHER; note = 2'-O-N-methyl acetamide modified 5-methyl cytosine with phosphorothioate linkage
  modified_base 2: mod_base = OTHER; note = 2'-O-N-methyl acetamide modified nucleotide with phosphorothioate linkage
  modified_base 3: mod_base = OTHER; note = 2'-O-N-methyl acetamide modified 5-methyl cytosine with phosphorothioate linkage
  modified_base 4: mod_base = OTHER; note = 2'-O-N-methyl acetamide modified thymine with phosphorothioate linkage
  modified_base 5: mod_base = OTHER; note = 2'-O-N-methyl acetamide modified thymine with phosphorothioate linkage
  modified_base 6: mod_base = OTHER; note = 2'-O-N-methyl acetamide modified thymine with phosphorothioate linkage
  modified_base 7: mod_base = OTHER; note = 2'-O-N-methyl acetamide modified 5-methyl cytosine with phosphorothioate linkage
  modified_base 8: mod_base = OTHER; note = 2'-O-N-methyl acetamide modified nucleotide with phosphorothioate linkage
  modified_base 9: mod_base = OTHER; note = 2'-O-N-methyl acetamide modified thymine with phosphorothioate linkage
  modified_base 10: mod_base = OTHER; note = 2'-O-N-methyl acetamide modified nucleotide with phosphorothioate linkage
  modified_base 11: mod_base = OTHER; note = 2'-O-N-methyl acetamide modified nucleotide with phosphorothioate linkage
  modified_base 12: mod_base = OTHER; note = 2'-O-N-methyl acetamide modified thymine with phosphorothioate linkage
  modified_base 13: mod_base = OTHER; note = 2'-O-N-methyl acetamide modified nucleotide with phosphorothioate linkage
  modified_base 14: mod_base = OTHER; note = 2'-O-N-methyl acetamide modified 5-methyl cytosine with phosphorothioate linkage
  modified_base 15: mod_base = OTHER; note = 2'-O-N-methyl acetamide modified thymine with phosphorothioate linkage
  modified_base 16: mod_base = OTHER; note = 2'-O-N-methyl acetamide modified nucleotide with phosphorothioate linkage
  modified_base 17: mod_base = OTHER; note = 2'-O-N-methyl acetamide modified nucleotide with phosphorothioate linkage
  modified_base 18: mod_base = OTHER; note = 2'-O-N-methyl acetamide modified 5-methyl cytosine with phosphorothioate linkage
  modified_base 19: mod_base = OTHER; note = 2'-O-N-methyl acetamide modified nucleotide
cactttcataatgctggca

SEQ ID NO: 173 - RNA, 20 nt, synthetic construct
  source 1..20: mol_type = other RNA
  modified_base 1: mod_base = OTHER; note = 2'-O-N-methyl acetamide modified thymine with phosphorothioate linkage
  modified_base 2: mod_base = OTHER; note = 2'-O-N-methyl acetamide modified 5-methyl cytosine with phosphorothioate linkage
  modified_base 3: mod_base = OTHER; note = 2'-O-N-methyl acetamide modified nucleotide with phosphorothioate linkage
  modified_base 4: mod_base = OTHER; note = 2'-O-N-methyl acetamide modified 5-methyl cytosine with phosphorothioate linkage
  modified_base 5: mod_base = OTHER; note = 2'-O-N-methyl acetamide modified thymine with phosphorothioate linkage
  modified_base 6: mod_base = OTHER; note = 2'-O-N-methyl acetamide modified thymine with phosphorothioate linkage
  modified_base 7: mod_base = OTHER; note = 2'-O-N-methyl acetamide modified thymine with phosphorothioate linkage
  modified_base 8: mod_base = OTHER; note = 2'-O-N-methyl acetamide modified 5-methyl cytosine with phosphorothioate linkage
  modified_base 9: mod_base = OTHER; note = 2'-O-N-methyl acetamide modified nucleotide with phosphorothioate linkage
  modified_base 10: mod_base = OTHER; note = 2'-O-N-methyl acetamide modified thymine with phosphorothioate linkage
  modified_base 11: mod_base = OTHER; note = 2'-O-N-methyl acetamide modified nucleotide with phosphorothioate linkage
  modified_base 12: mod_base = OTHER; note = 2'-O-N-methyl acetamide modified nucleotide with phosphorothioate linkage
  modified_base 13: mod_base = OTHER; note = 2'-O-N-methyl acetamide modified thymine with phosphorothioate linkage
  modified_base 14: mod_base = OTHER; note = 2'-O-N-methyl acetamide modified nucleotide with phosphorothioate linkage
  modified_base 15: mod_base = OTHER; note = 2'-O-N-methyl acetamide modified 5-methyl cytosine with phosphorothioate linkage
  modified_base 16: mod_base = OTHER; note = 2'-O-N-methyl acetamide modified thymine with phosphorothioate linkage
  modified_base 17: mod_base = OTHER; note = 2'-O-N-methyl acetamide modified nucleotide with phosphorothioate linkage
  modified_base 18: mod_base = OTHER; note = 2'-O-N-methyl acetamide modified nucleotide with phosphorothioate linkage
  modified_base 19: mod_base = OTHER; note = 2'-O-N-methyl acetamide modified 5-methyl cytosine with phosphorothioate linkage
  modified_base 20: mod_base = OTHER; note = 2'-O-N-methyl acetamide modified nucleotide
tcactttcataatgctggca

SEQ ID NO: 174 - RNA, 16 nt, synthetic construct
  source 1..16: mol_type = other RNA
  modified_base 1: mod_base = OTHER; note = 2'-O-N-methyl acetamide modified 5-methyl cytosine with phosphorothioate linkage
  modified_base 2: mod_base = OTHER; note = 2'-O-N-methyl acetamide modified thymine with phosphorothioate linkage
  modified_base 3: mod_base = OTHER; note = 2'-O-N-methyl acetamide modified thymine with phosphorothioate linkage
  modified_base 4: mod_base = OTHER; note = 2'-O-N-methyl acetamide modified thymine with phosphorothioate linkage
  modified_base 5: mod_base = OTHER; note = 2'-O-N-methyl acetamide modified 5-methyl cytosine with phosphorothioate linkage
  modified_base 6: mod_base = OTHER; note = 2'-O-N-methyl acetamide modified nucleotide with phosphorothioate linkage
  modified_base 7: mod_base = OTHER; note = 2'-O-N-methyl acetamide modified thymine with phosphorothioate linkage
  modified_base 8: mod_base = OTHER; note = 2'-O-N-methyl acetamide modified nucleotide with phosphorothioate linkage
  modified_base 9: mod_base = OTHER; note = 2'-O-N-methyl acetamide modified nucleotide with phosphorothioate linkage
  modified_base 10: mod_base = OTHER; note = 2'-O-N-methyl acetamide modified thymine with phosphorothioate linkage
  modified_base 11: mod_base = OTHER; note = 2'-O-N-methyl acetamide modified nucleotide with phosphorothioate linkage
  modified_base 12: mod_base = OTHER; note = 2'-O-N-methyl acetamide modified 5-methyl cytosine with phosphorothioate linkage
  modified_base 13: mod_base = OTHER; note = 2'-O-N-methyl acetamide modified thymine with phosphorothioate linkage
  modified_base 14: mod_base = OTHER; note = 2'-O-N-methyl acetamide modified nucleotide with phosphorothioate linkage
  modified_base 15: mod_base = OTHER; note = 2'-O-N-methyl acetamide modified nucleotide with phosphorothioate linkage
  modified_base 16: mod_base = OTHER; note = 2'-O-N-methyl acetamide modified 5-methyl cytosine
ctttcataatgctggc

SEQ ID NO: 175 - RNA, 17 nt, synthetic construct
  source 1..17: mol_type = other RNA
  modified_base 1: mod_base = OTHER; note = 2'-O-N-methyl acetamide modified nucleotide with phosphorothioate linkage
  modified_base 2: mod_base = OTHER; note = 2'-O-N-methyl acetamide modified 5-methyl cytosine with phosphorothioate linkage
  modified_base 3: mod_base = OTHER; note = 2'-O-N-methyl acetamide modified thymine with phosphorothioate linkage
  modified_base 4: mod_base = OTHER; note = 2'-O-N-methyl acetamide modified thymine with phosphorothioate linkage
  modified_base 5: mod_base = OTHER; note = 2'-O-N-methyl acetamide modified thymine with phosphorothioate linkage
  modified_base 6: mod_base = OTHER; note = 2'-O-N-methyl acetamide modified 5-methyl cytosine with phosphorothioate linkage
  modified_base 7: mod_base = OTHER; note = 2'-O-N-methyl acetamide modified nucleotide with phosphorothioate linkage
  modified_base 8: mod_base = OTHER; note = 2'-O-N-methyl acetamide modified thymine with phosphorothioate linkage
  modified_base 9: mod_base = OTHER; note = 2'-O-N-methyl acetamide modified nucleotide with phosphorothioate linkage
  modified_base 10: mod_base = OTHER; note = 2'-O-N-methyl acetamide modified nucleotide with phosphorothioate linkage
  modified_base 11: mod_base = OTHER; note = 2'-O-N-methyl acetamide modified thymine with phosphorothioate linkage
  modified_base 12: mod_base = OTHER; note = 2'-O-N-methyl acetamide modified nucleotide with phosphorothioate linkage
  modified_base 13: mod_base = OTHER; note = 2'-O-N-methyl acetamide modified 5-methyl cytosine with phosphorothioate linkage
  modified_base 14: mod_base = OTHER; note = 2'-O-N-methyl acetamide modified thymine with phosphorothioate linkage
  modified_base 15: mod_base = OTHER; note = 2'-O-N-methyl acetamide modified nucleotide with phosphorothioate linkage
  modified_base 16: mod_base = OTHER; note = 2'-O-N-methyl acetamide modified nucleotide with phosphorothioate linkage
  modified_base 17: mod_base = OTHER; note = 2'-O-N-methyl acetamide modified 5-methyl cytosine
actttcataatgctggc

SEQ ID NO: 176 - RNA, 18 nt, synthetic construct
  source 1..18: mol_type = other RNA
  modified_base 1: mod_base = OTHER; note = 2'-O-N-methyl acetamide modified 5-methyl cytosine with phosphorothioate linkage
  modified_base 2: mod_base = OTHER; note = 2'-O-N-methyl acetamide modified nucleotide with phosphorothioate linkage
  modified_base 3: mod_base = OTHER; note = 2'-O-N-methyl acetamide modified 5-methyl cytosine
  modified_base 4: mod_base = OTHER; note = 2'-O-N-methyl acetamide modified thymine with phosphorothioate linkage
  modified_base 5: mod_base = OTHER; note = 2'-O-N-methyl acetamide modified thymine with phosphorothioate linkage
  modified_base 6: mod_base = OTHER; note = 2'-O-N-methyl acetamide modified thymine with phosphorothioate linkage
  modified_base 7: mod_base = OTHER; note = 2'-O-N-methyl acetamide modified 5-methyl cytosine with phosphorothioate linkage
  modified_base 8: mod_base = OTHER; note = 2'-O-N-methyl acetamide modified nucleotide with phosphorothioate linkage
  modified_base 9: mod_base = OTHER; note = 2'-O-N-methyl acetamide modified thymine with phosphorothioate linkage
  modified_base 10: mod_base = OTHER; note = 2'-O-N-methyl acetamide modified nucleotide with phosphorothioate linkage
  modified_base 11: mod_base = OTHER; note = 2'-O-N-methyl acetamide modified nucleotide with phosphorothioate linkage
  modified_base 12: mod_base = OTHER; note = 2'-O-N-methyl acetamide modified thymine with phosphorothioate linkage
  modified_base 13: mod_base = OTHER; note = 2'-O-N-methyl acetamide modified nucleotide with phosphorothioate linkage
  modified_base 14: mod_base = OTHER; note = 2'-O-N-methyl acetamide modified 5-methyl cytosine with phosphorothioate linkage
  modified_base 15: mod_base = OTHER; note = 2'-O-N-methyl acetamide modified thymine
  modified_base 16: mod_base = OTHER; note = 2'-O-N-methyl acetamide modified nucleotide with phosphorothioate linkage
  modified_base 17: mod_base = OTHER; note = 2'-O-N-methyl acetamide modified nucleotide with phosphorothioate linkage
  modified_base 18: mod_base = OTHER; note = 2'-O-N-methyl acetamide modified 5-methyl cytosine
cactttcataatgctggc

SEQ ID NO: 177 - RNA, 18 nt, synthetic construct
  source 1..18: mol_type = other RNA
  modified_base 1: mod_base = OTHER; note = 2'-O-N-methyl acetamide modified 5-methyl cytosine with phosphorothioate linkage
  modified_base 2: mod_base = OTHER; note = 2'-O-N-methyl acetamide modified nucleotide with phosphorothioate linkage
  modified_base 3: mod_base = OTHER; note = 2'-O-N-methyl acetamide modified 5-methyl cytosine
  modified_base 4: mod_base = OTHER; note = 2'-O-N-methyl acetamide modified thymine with phosphorothioate linkage
  modified_base 5: mod_base = OTHER; note = 2'-O-N-methyl acetamide modified thymine with phosphorothioate linkage
  modified_base 6: mod_base = OTHER; note = 2'-O-N-methyl acetamide modified thymine with phosphorothioate linkage
  modified_base 7: mod_base = OTHER; note = 2'-O-N-methyl acetamide modified 5-methyl cytosine with phosphorothioate linkage
  modified_base 8: mod_base = OTHER; note = 2'-O-N-methyl acetamide modified nucleotide with phosphorothioate linkage
  modified_base 9: mod_base = OTHER; note = 2'-O-N-methyl acetamide modified thymine
  modified_base 10: mod_base = OTHER; note = 2'-O-N-methyl acetamide modified nucleotide with phosphorothioate linkage
  modified_base 11: mod_base = OTHER; note = 2'-O-N-methyl acetamide modified nucleotide with phosphorothioate linkage
  modified_base 12: mod_base = OTHER; note = 2'-O-N-methyl acetamide modified thymine with phosphorothioate linkage
  modified_base 13: mod_base = OTHER; note = 2'-O-N-methyl acetamide modified nucleotide with phosphorothioate linkage
  modified_base 14: mod_base = OTHER; note = 2'-O-N-methyl acetamide modified 5-methyl cytosine with phosphorothioate linkage
  modified_base 15: mod_base = OTHER; note = 2'-O-N-methyl acetamide modified thymine
  modified_base 16: mod_base = OTHER; note = 2'-O-N-methyl acetamide modified nucleotide with phosphorothioate linkage
  modified_base 17: mod_base = OTHER; note = 2'-O-N-methyl acetamide modified nucleotide with phosphorothioate linkage
  modified_base 18: mod_base = OTHER; note = 2'-O-N-methyl acetamide modified 5-methyl cytosine
cactttcataatgctggc

SEQ ID NO: 178 - RNA, 18 nt, synthetic construct
  source 1..18: mol_type = other RNA
  modified_base 1: mod_base = OTHER; note = 2'-O-N-methyl acetamide modified 5-methyl cytosine with phosphorothioate linkage
  modified_base 2: mod_base = OTHER; note = 2'-O-N-methyl acetamide modified nucleotide with phosphorothioate linkage
  modified_base 3: mod_base = OTHER; note = 2'-O-N-methyl acetamide modified 5-methyl cytosine
  modified_base 4: mod_base = OTHER; note = 2'-O-N-methyl acetamide modified thymine with phosphorothioate linkage
  modified_base 5: mod_base = OTHER; note = 2'-O-N-methyl acetamide modified thymine with phosphorothioate linkage
  modified_base 6: mod_base = OTHER; note = 2'-O-N-methyl acetamide modified thymine with phosphorothioate linkage
  modified_base 7: mod_base = OTHER; note = 2'-O-N-methyl acetamide modified 5-methyl cytosine
  modified_base 8: mod_base = OTHER; note = 2'-O-N-methyl acetamide modified nucleotide with phosphorothioate linkage
  modified_base 9: mod_base = OTHER; note = 2'-O-N-methyl acetamide modified thymine with phosphorothioate linkage
  modified_base 10: mod_base = OTHER; note = 2'-O-N-methyl acetamide modified nucleotide with phosphorothioate linkage
  modified_base 11: mod_base = OTHER; note = 2'-O-N-methyl acetamide modified nucleotide
  modified_base 12: mod_base = OTHER; note = 2'-O-N-methyl acetamide modified thymine with phosphorothioate linkage
  modified_base 13: mod_base = OTHER; note = 2'-O-N-methyl acetamide modified nucleotide with phosphorothioate linkage
  modified_base 14: mod_base = OTHER; note = 2'-O-N-methyl acetamide modified 5-methyl cytosine with phosphorothioate linkage
  modified_base 15: mod_base = OTHER; note = 2'-O-N-methyl acetamide modified thymine
  modified_base 16: mod_base = OTHER; note = 2'-O-N-methyl acetamide modified nucleotide with phosphorothioate linkage
  modified_base 17: mod_base = OTHER; note = 2'-O-N-methyl acetamide modified nucleotide with phosphorothioate linkage
  modified_base 18: mod_base = OTHER; note = 2'-O-N-methyl acetamide modified 5-methyl cytosine
cactttcataatgctggc

SEQ ID NO: 179 - RNA, 18 nt, synthetic construct
  source 1..18: mol_type = other RNA
  modified_base 1: mod_base = OTHER; note = 2'-O-N-methyl acetamide modified 5-methyl cytosine with phosphorothioate linkage
  modified_base 2: mod_base = OTHER; note = 2'-O-N-methyl acetamide modified nucleotide
  modified_base 3: mod_base = OTHER; note = 2'-O-N-methyl acetamide modified 5-methyl cytosine
  modified_base 4: mod_base = OTHER; note = 2'-O-N-methyl acetamide modified thymine with phosphorothioate linkage
  modified_base 5: mod_base = OTHER; note = 2'-O-N-methyl acetamide modified thymine with phosphorothioate linkage
  modified_base 6: mod_base = OTHER; note = 2'-O-N-methyl acetamide modified thymine with phosphorothioate linkage
  modified_base 7: mod_base = OTHER; note = 2'-O-N-methyl acetamide modified 5-methyl cytosine with phosphorothioate linkage
  modified_base 8: mod_base = OTHER; note = 2'-O-N-methyl acetamide modified nucleotide with phosphorothioate linkage
  modified_base 9: mod_base = OTHER; note = 2'-O-N-methyl acetamide modified thymine with phosphorothioate linkage
  modified_base 10: mod_base = OTHER; note = 2'-O-N-methyl acetamide modified nucleotide with phosphorothioate linkage
  modified_base 11: mod_base = OTHER; note = 2'-O-N-methyl acetamide modified nucleotide with phosphorothioate linkage
  modified_base 12: mod_base = OTHER; note = 2'-O-N-methyl acetamide modified thymine with phosphorothioate linkage
  modified_base 13: mod_base = OTHER; note = 2'-O-N-methyl acetamide modified nucleotide with phosphorothioate linkage
  modified_base 14: mod_base = OTHER; note = 2'-O-N-methyl acetamide modified 5-methyl cytosine
  modified_base 15: mod_base = OTHER; note = 2'-O-N-methyl acetamide modified thymine
  modified_base 16: mod_base = OTHER; note = 2'-O-N-methyl acetamide modified nucleotide with phosphorothioate linkage
  modified_base 17: mod_base = OTHER; note = 2'-O-N-methyl acetamide modified nucleotide with phosphorothioate linkage
  modified_base 18: mod_base = OTHER; note = 2'-O-N-methyl acetamide modified 5-methyl cytosine
cactttcataatgctggc

SEQ ID NO: 180 - RNA, 18 nt, synthetic construct
  source 1..18: mol_type = other RNA
  modified_base 1: mod_base = OTHER; note = 2'-O-N-methyl acetamide modified 5-methyl cytosine with phosphorothioate linkage
  modified_base 2: mod_base = OTHER; note = 2'-O-N-methyl acetamide modified nucleotide
  modified_base 3: mod_base = OTHER; note = 2'-O-N-methyl acetamide modified 5-methyl cytosine
  modified_base 4: mod_base = OTHER; note = 2'-O-N-methyl acetamide modified thymine
  modified_base 5: mod_base = OTHER; note = 2'-O-N-methyl acetamide modified thymine with phosphorothioate linkage
  modified_base 6: mod_base = OTHER; note = 2'-O-N-methyl acetamide modified thymine with phosphorothioate linkage
  modified_base 7: mod_base = OTHER; note = 2'-O-N-methyl acetamide modified 5-methyl cytosine with phosphorothioate linkage
  modified_base 8: mod_base = OTHER; note = 2'-O-N-methyl acetamide modified nucleotide with phosphorothioate linkage
  modified_base 9: mod_base = OTHER; note = 2'-O-N-methyl acetamide modified thymine with phosphorothioate linkage
  modified_base 10: mod_base = OTHER; note = 2'-O-N-methyl acetamide modified nucleotide with phosphorothioate linkage
  modified_base 11: mod_base = OTHER; note = 2'-O-N-methyl acetamide modified nucleotide with phosphorothioate linkage
  modified_base 12: mod_base = OTHER; note = 2'-O-N-methyl acetamide modified thymine with phosphorothioate linkage
  modified_base 13: mod_base = OTHER; note = 2'-O-N-methyl acetamide modified nucleotide with phosphorothioate linkage
  modified_base 14: mod_base = OTHER; note = 2'-O-N-methyl acetamide modified 5-methyl cytosine
  modified_base 15: mod_base = OTHER; note = 2'-O-N-methyl acetamide modified thymine
  modified_base 16: mod_base = OTHER; note = 2'-O-N-methyl acetamide modified nucleotide with phosphorothioate linkage
  modified_base 17: mod_base = OTHER; note = 2'-O-N-methyl acetamide modified nucleotide with phosphorothioate linkage
  modified_base 18: mod_base = OTHER; note = 2'-O-N-methyl acetamide modified 5-methyl cytosine
cactttcataatgctggc

SEQ ID NO: 181 - RNA, 18 nt, synthetic construct
  source 1..18: mol_type = other RNA
  modified_base 1: mod_base = OTHER; note = 2'-O-N-methyl acetamide modified 5-methyl cytosine with phosphorothioate linkage
  modified_base 2: mod_base = OTHER; note = 2'-O-N-methyl acetamide modified nucleotide
  modified_base 3: mod_base = OTHER; note = 2'-O-N-methyl acetamide modified 5-methyl cytosine
  modified_base 4: mod_base = OTHER; note = 2'-O-N-methyl acetamide modified thymine
  modified_base 5: mod_base = OTHER; note = 2'-O-N-methyl acetamide modified thymine with phosphorothioate linkage
  modified_base 6: mod_base = OTHER; note = 2'-O-N-methyl acetamide modified thymine with phosphorothioate linkage
  modified_base 7: mod_base = OTHER; note = 2'-O-N-methyl acetamide modified 5-methyl cytosine with phosphorothioate linkage
  modified_base 8: mod_base = OTHER; note = 2'-O-N-methyl acetamide modified nucleotide with phosphorothioate linkage
  modified_base 9: mod_base = OTHER; note = 2'-O-N-methyl acetamide modified thymine with phosphorothioate linkage
  modified_base 10: mod_base = OTHER; note = 2'-O-N-methyl acetamide modified nucleotide with phosphorothioate linkage
  modified_base 11: mod_base = OTHER; note = 2'-O-N-methyl acetamide modified nucleotide with phosphorothioate linkage
  modified_base 12: mod_base = OTHER; note = 2'-O-N-methyl acetamide modified thymine with phosphorothioate linkage
  modified_base 13: mod_base = OTHER; note = 2'-O-N-methyl acetamide modified nucleotide
  modified_base 14: mod_base = OTHER; note = 2'-O-N-methyl acetamide modified 5-methyl cytosine
  modified_base 15: mod_base = OTHER; note = 2'-O-N-methyl acetamide modified thymine
  modified_base 16: mod_base = OTHER; note = 2'-O-N-methyl acetamide modified nucleotide with phosphorothioate linkage
  modified_base 17: mod_base = OTHER; note = 2'-O-N-methyl acetamide modified nucleotide with phosphorothioate linkage
  modified_base 18: mod_base = OTHER; note = 2'-O-N-methyl acetamide modified 5-methyl cytosine
cactttcataatgctggc

SEQ ID NO: 182 - RNA, 18 nt, synthetic construct
  source 1..18: mol_type = other RNA
  modified_base 1: mod_base = OTHER; note = 2'-O-N-methyl acetamide modified 5-methyl cytosine with phosphorothioate linkage
  modified_base 2: mod_base = OTHER; note = 2'-O-N-methyl acetamide modified nucleotide with phosphorothioate linkage
  modified_base 3: mod_base = OTHER; note = 2'-O-N-methyl acetamide modified 5-methyl cytosine with phosphorothioate linkage
  modified_base 4: mod_base = OTHER; note = 2'-O-N-methyl acetamide modified thymine with phosphorothioate linkage
  modified_base 5: mod_base = OTHER; note = 2'-O-N-methyl acetamide modified thymine with phosphorothioate linkage
  modified_base 6: mod_base = OTHER; note = 2'-O-N-methyl acetamide modified thymine with phosphorothioate linkage
  modified_base 7: mod_base = OTHER; note = 2'-O-N-methyl acetamide modified 5-methyl cytosine
  modified_base 8: mod_base = OTHER; note = 2'-O-N-methyl acetamide modified nucleotide
  modified_base 9: mod_base = OTHER; note = 2'-O-N-methyl acetamide modified thymine
  modified_base 10: mod_base = OTHER; note = 2'-O-N-methyl acetamide modified nucleotide
  modified_base 11: mod_base = OTHER; note = 2'-O-N-methyl acetamide modified nucleotide
  modified_base 12: mod_base = OTHER; note = 2'-O-N-methyl acetamide modified thymine with phosphorothioate linkage
  modified_base 13: mod_base = OTHER; note = 2'-O-N-methyl acetamide modified nucleotide with phosphorothioate linkage
  modified_base 14: mod_base = OTHER; note = 2'-O-N-methyl acetamide modified 5-methyl cytosine with phosphorothioate linkage
  modified_base 15: mod_base = OTHER; note = 2'-O-N-methyl acetamide modified thymine with phosphorothioate linkage
  modified_base 16: mod_base = OTHER; note = 2'-O-N-methyl acetamide modified nucleotide with phosphorothioate linkage
  modified_base 17: mod_base = OTHER; note = 2'-O-N-methyl acetamide modified nucleotide with phosphorothioate linkage
  modified_base 18: mod_base = OTHER; note = 2'-O-N-methyl acetamide modified 5-methyl cytosine
cactttcataatgctggc

SEQ ID NO: 183 - RNA, 18 nt, synthetic construct
  source 1..18: mol_type = other RNA
  modified_base 1: mod_base = OTHER; note = 2'-O-N-methyl acetamide modified 5-methyl cytosine with phosphorothioate linkage
  modified_base 2: mod_base = OTHER; note = 2'-O-N-methyl acetamide modified nucleotide with phosphorothioate linkage
  modified_base 3: mod_base = OTHER; note = 2'-O-N-methyl acetamide modified 5-methyl cytosine with phosphorothioate linkage
  modified_base 4: mod_base = OTHER; note = 2'-O-N-methyl acetamide modified thymine with phosphorothioate linkage
  modified_base 5: mod_base = OTHER; note = 2'-O-N-methyl acetamide modified thymine with phosphorothioate linkage
  modified_base 6: mod_base = OTHER; note = 2'-O-N-methyl acetamide modified thymine with phosphorothioate linkage
  modified_base 7: mod_base = OTHER; note = 2'-O-N-methyl acetamide modified 5-methyl cytosine with phosphorothioate linkage
  modified_base 8: mod_base = OTHER; note = 2'-O-N-methyl acetamide modified nucleotide
  modified_base 9: mod_base = OTHER; note = 2'-O-N-methyl acetamide modified thymine
  modified_base 10: mod_base = OTHER; note = 2'-O-N-methyl acetamide modified nucleotide
  modified_base 11: mod_base = OTHER; note = 2'-O-N-methyl acetamide modified nucleotide with phosphorothioate linkage
  modified_base 12: mod_base = OTHER; note = 2'-O-N-methyl acetamide modified thymine with phosphorothioate linkage
  modified_base 13: mod_base = OTHER; note = 2'-O-N-methyl acetamide modified nucleotide with phosphorothioate linkage
  modified_base 14: mod_base = OTHER; note = 2'-O-N-methyl acetamide modified 5-methyl cytosine with phosphorothioate linkage
  modified_base 15: mod_base = OTHER; note = 2'-O-N-methyl acetamide modified thymine with phosphorothioate linkage
  modified_base 16: mod_base = OTHER; note = 2'-O-N-methyl acetamide modified nucleotide with phosphorothioate linkage
  modified_base 17: mod_base = OTHER; note = 2'-O-N-methyl acetamide modified nucleotide with phosphorothioate linkage
  modified_base 18: mod_base = OTHER; note = 2'-O-N-methyl acetamide modified 5-methyl cytosine
cactttcataatgctggc

SEQ ID NO: 184 - RNA, 19 nt, synthetic construct
  source 1..19: mol_type = other RNA
  modified_base 1: mod_base = OTHER; note = 2'-O-N-methyl acetamide modified thymine with phosphorothioate linkage
  modified_base 2: mod_base = OTHER; note = 2'-O-N-methyl acetamide modified 5-methyl cytosine with phosphorothioate linkage
  modified_base 3: mod_base = OTHER; note = 2'-O-N-methyl acetamide modified nucleotide with phosphorothioate linkage
  modified_base 4: mod_base = OTHER; note = 2'-O-N-methyl acetamide modified 5-methyl cytosine with phosphorothioate linkage
  modified_base 5: mod_base = OTHER; note = 2'-O-N-methyl acetamide modified thymine with phosphorothioate linkage
  modified_base 6: mod_base = OTHER; note = 2'-O-N-methyl acetamide modified thymine with phosphorothioate linkage
  modified_base 7: mod_base = OTHER; note = 2'-O-N-methyl acetamide modified thymine with phosphorothioate linkage
  modified_base 8: mod_base = OTHER; note = 2'-O-N-methyl acetamide modified 5-methyl cytosine with phosphorothioate linkage
  modified_base 9: mod_base = OTHER; note = 2'-O-N-methyl acetamide modified nucleotide with phosphorothioate linkage
  modified_base 10: mod_base = OTHER; note = 2'-O-N-methyl acetamide modified thymine with phosphorothioate linkage
  modified_base 11: mod_base = OTHER; note = 2'-O-N-methyl acetamide modified nucleotide with phosphorothioate linkage
  modified_base 12: mod_base = OTHER; note = 2'-O-N-methyl acetamide modified nucleotide with phosphorothioate linkage
  modified_base 13: mod_base = OTHER; note = 2'-O-N-methyl acetamide modified thymine with phosphorothioate linkage
  modified_base 14: mod_base = OTHER; note = 2'-O-N-methyl acetamide modified nucleotide with phosphorothioate linkage
  modified_base 15: mod_base = OTHER; note = 2'-O-N-methyl acetamide modified 5-methyl cytosine with phosphorothioate linkage
  modified_base 16: mod_base = OTHER; note = 2'-O-N-methyl acetamide modified thymine with phosphorothioate linkage
  modified_base 17: mod_base = OTHER; note = 2'-O-N-methyl acetamide modified nucleotide with phosphorothioate linkage
  modified_base 18: mod_base = OTHER; note = 2'-O-N-methyl acetamide modified nucleotide with phosphorothioate linkage
  modified_base 19: mod_base = OTHER; note = 2'-O-N-methyl acetamide modified 5-methyl cytosine
tcactttcataatgctggc

SEQ ID NO: 185 - RNA, 17 nt, synthetic construct
  source 1..17: mol_type = other RNA
  modified_base 1: mod_base = OTHER; note = 2'-O-N-methyl acetamide modified 5-methyl cytosine with phosphorothioate linkage
  modified_base 2: mod_base = OTHER; note = 2'-O-N-methyl acetamide modified nucleotide with phosphorothioate linkage
  modified_base 3: mod_base = OTHER; note = 2'-O-N-methyl acetamide modified 5-methyl cytosine with phosphorothioate linkage
  modified_base 4: mod_base = OTHER; note = 2'-O-N-methyl acetamide modified thymine with phosphorothioate linkage
  modified_base 5: mod_base = OTHER; note = 2'-O-N-methyl acetamide modified thymine with phosphorothioate linkage
  modified_base 6: mod_base = OTHER; note = 2'-O-N-methyl acetamide modified thymine with phosphorothioate linkage
  modified_base 7: mod_base = OTHER; note = 2'-O-N-methyl acetamide modified 5-methyl cytosine with phosphorothioate linkage
  modified_base 8: mod_base = OTHER; note = 2'-O-N-methyl acetamide modified nucleotide with phosphorothioate linkage
  modified_base 9: mod_base = OTHER; note = 2'-O-N-methyl acetamide modified thymine with phosphorothioate linkage
  modified_base 10: mod_base = OTHER; note = 2'-O-N-methyl acetamide modified nucleotide with phosphorothioate linkage
  modified_base 11: mod_base = OTHER; note = 2'-O-N-methyl acetamide modified nucleotide with phosphorothioate linkage
  modified_base 12: mod_base = OTHER; note = 2'-O-N-methyl acetamide modified thymine with phosphorothioate linkage
  modified_base 13: mod_base = OTHER; note = 2'-O-N-methyl acetamide modified nucleotide with phosphorothioate linkage
  modified_base 14: mod_base = OTHER; note = 2'-O-N-methyl acetamide modified 5-methyl cytosine with phosphorothioate linkage
  modified_base 15: mod_base = OTHER; note = 2'-O-N-methyl acetamide modified thymine with phosphorothioate linkage
  modified_base 16: mod_base = OTHER; note = 2'-O-N-methyl acetamide modified nucleotide with phosphorothioate linkage
  modified_base 17: mod_base = OTHER; note = 2'-O-N-methyl acetamide modified nucleotide
cactttcataatgctgg

SEQ ID NO: 186 - RNA, 18 nt, synthetic construct
  source 1..18: mol_type = other RNA
  modified_base 1: mod_base = OTHER; note = 2'-O-N-methyl acetamide modified thymine with phosphorothioate linkage
  modified_base 2: mod_base = OTHER; note = 2'-O-N-methyl acetamide modified 5-methyl cytosine
  modified_base 3: mod_base = OTHER; note = 2'-O-N-methyl acetamide modified nucleotide with phosphorothioate linkage
  modified_base 4: mod_base = OTHER; note = 2'-O-N-methyl acetamide modified 5-methyl cytosine with phosphorothioate linkage
  modified_base 5: mod_base = OTHER; note = 2'-O-N-methyl acetamide modified thymine with phosphorothioate linkage
  modified_base 6: mod_base = OTHER; note = 2'-O-N-methyl acetamide modified thymine with phosphorothioate linkage
  modified_base 7: mod_base = OTHER; note = 2'-O-N-methyl acetamide modified thymine with phosphorothioate linkage
  modified_base 8: mod_base = OTHER; note = 2'-O-N-methyl acetamide modified 5-methyl cytosine with phosphorothioate linkage
  modified_base 9: mod_base = OTHER; note = 2'-O-N-methyl acetamide modified nucleotide with phosphorothioate linkage
  modified_base 10: mod_base = OTHER; note = 2'-O-N-methyl acetamide modified thymine with phosphorothioate linkage
  modified_base 11: mod_base = OTHER; note = 2'-O-N-methyl acetamide modified nucleotide with phosphorothioate linkage
  modified_base 12: mod_base = OTHER; note = 2'-O-N-methyl acetamide modified nucleotide with phosphorothioate linkage
  modified_base 13: mod_base = OTHER; note = 2'-O-N-methyl acetamide modified thymine with phosphorothioate linkage
  modified_base 14: mod_base = OTHER; note = 2'-O-N-methyl acetamide modified nucleotide with phosphorothioate linkage
  modified_base 15: mod_base = OTHER; note = 2'-O-N-methyl acetamide modified 5-methyl cytosine
  modified_base 16: mod_base = OTHER; note = 2'-O-N-methyl acetamide modified thymine with phosphorothioate linkage
  modified_base 17: mod_base = OTHER; note = 2'-O-N-methyl acetamide modified nucleotide with phosphorothioate linkage
  modified_base 18: mod_base = OTHER; note = 2'-O-N-methyl acetamide modified nucleotide
tcactttcataatgctgg

SEQ ID NO: 187 - RNA, 18 nt, synthetic construct
  source 1..18: mol_type = other RNA
  modified_base 1: mod_base = OTHER; note = 2'-O-N-methyl acetamide modified thymine with phosphorothioate linkage
  modified_base 2: mod_base = OTHER; note = 2'-O-N-methyl acetamide modified 5-methyl cytosine with phosphorothioate linkage
  modified_base 3: mod_base = OTHER; note = 2'-O-N-methyl acetamide modified nucleotide with phosphorothioate linkage
  modified_base 4: mod_base = OTHER; note = 2'-O-N-methyl acetamide modified 5-methyl cytosine with phosphorothioate linkage
  modified_base 5: mod_base = OTHER; note = 2'-O-N-methyl acetamide modified thymine with phosphorothioate linkage
  modified_base 6: mod_base = OTHER; note = 2'-O-N-methyl acetamide modified thymine with phosphorothioate linkage
  modified_base 7: mod_base = OTHER; note = 2'-O-N-methyl acetamide modified thymine with phosphorothioate linkage
  modified_base 8: mod_base = OTHER; note = 2'-O-N-methyl acetamide modified 5-methyl cytosine with phosphorothioate linkage
  modified_base 9: mod_base = OTHER; note = 2'-O-N-methyl acetamide modified nucleotide
  modified_base 10: mod_base = OTHER; note = 2'-O-N-methyl acetamide modified thymine with phosphorothioate linkage
  modified_base 11: mod_base = OTHER; note = 2'-O-N-methyl acetamide modified nucleotide with phosphorothioate linkage
  modified_base 12: mod_base = OTHER; note = 2'-O-N-methyl acetamide modified nucleotide with phosphorothioate linkage
  modified_base 13: mod_base = OTHER; note = 2'-O-N-methyl acetamide modified thymine with phosphorothioate linkage
  modified_base 14: mod_base = OTHER; note = 2'-O-N-methyl acetamide modified nucleotide with phosphorothioate linkage
  modified_base 15: mod_base = OTHER; note = 2'-O-N-methyl acetamide modified 5-methyl cytosine with phosphorothioate linkage
  modified_base 16: mod_base = OTHER; note = 2'-O-N-methyl acetamide modified thymine with phosphorothioate linkage
  modified_base 17: mod_base = OTHER; note = 2'-O-N-methyl acetamide modified nucleotide with phosphorothioate linkage
  modified_base 18: mod_base = OTHER; note = 2'-O-N-methyl acetamide modified nucleotide
tcactttcataatgctgg

SEQ ID NO: 188 - RNA, 18 nt, synthetic construct
  source 1..18: mol_type = other RNA
  modified_base 1: mod_base = OTHER; note = 2'-O-N-methyl acetamide modified thymine with phosphorothioate linkage
  modified_base 2: mod_base = OTHER; note = 2'-O-N-methyl acetamide modified 5-methyl cytosine with phosphorothioate linkage
  modified_base 3: mod_base = OTHER; note = 2'-O-N-methyl acetamide modified nucleotide with phosphorothioate linkage
  modified_base 4: mod_base = OTHER; note = 2'-O-N-methyl acetamide modified 5-methyl cytosine with phosphorothioate linkage
  modified_base 5: mod_base = OTHER; note = 2'-O-N-methyl acetamide modified thymine with phosphorothioate linkage
  modified_base 6: mod_base = OTHER; note = 2'-O-N-methyl acetamide modified thymine with phosphorothioate linkage
  modified_base 7: mod_base = OTHER; note = 2'-O-N-methyl acetamide modified thymine with phosphorothioate linkage
  modified_base 8: mod_base = OTHER; note = 2'-O-N-methyl acetamide modified 5-methyl cytosine with phosphorothioate linkage
  modified_base 9: mod_base = OTHER; note = 2'-O-N-methyl acetamide modified nucleotide
  modified_base 10: mod_base = OTHER; note = 2'-O-N-methyl acetamide modified thymine with phosphorothioate linkage
  modified_base 11: mod_base = OTHER; note = 2'-O-N-methyl acetamide modified nucleotide with phosphorothioate linkage
  modified_base 12: mod_base = OTHER; note = 2'-O-N-methyl acetamide modified nucleotide with phosphorothioate linkage
  modified_base 13: mod_base = OTHER; note = 2'-O-N-methyl acetamide modified thymine with phosphorothioate linkage
  modified_base 14: mod_base = OTHER; note = 2'-O-N-methyl acetamide modified nucleotide with phosphorothioate linkage
  modified_base 15: mod_base = OTHER; note = 2'-O-N-methyl acetamide modified 5-methyl cytosine
  modified_base 16: mod_base = OTHER; note = 2'-O-N-methyl acetamide modified thymine with phosphorothioate linkage
  modified_base 17: mod_base = OTHER; note = 2'-O-N-methyl acetamide modified nucleotide with phosphorothioate linkage
  modified_base 18: mod_base = OTHER; note = 2'-O-N-methyl acetamide modified nucleotide
tcactttcataatgctgg

SEQ ID NO: 189 - RNA, 18 nt, synthetic construct
  source 1..18: mol_type = other RNA
  modified_base 1: mod_base = OTHER; note = 2'-O-N-methyl acetamide modified thymine with phosphorothioate linkage
  modified_base 2: mod_base = OTHER; note = 2'-O-N-methyl acetamide modified 5-methyl cytosine with phosphorothioate linkage
  modified_base 3: mod_base = OTHER; note = 2'-O-N-methyl acetamide modified nucleotide with phosphorothioate linkage
  modified_base 4: mod_base = OTHER; note = 2'-O-N-methyl acetamide modified 5-methyl cytosine with phosphorothioate linkage
  modified_base 5: mod_base = OTHER; note = 2'-O-N-methyl acetamide modified thymine with phosphorothioate linkage
  modified_base 6: mod_base = OTHER; note = 2'-O-N-methyl acetamide modified thymine with phosphorothioate linkage
  modified_base 7: mod_base = OTHER; note = 2'-O-N-methyl acetamide modified thymine with phosphorothioate linkage
  modified_base 8: mod_base = OTHER; note = 2'-O-N-methyl acetamide modified 5-methyl cytosine with phosphorothioate linkage
  modified_base 9: mod_base = OTHER; note = 2'-O-N-methyl acetamide modified nucleotide with phosphorothioate linkage
  modified_base 10: mod_base = OTHER; note = 2'-O-N-methyl acetamide modified thymine with phosphorothioate linkage
  modified_base 11: mod_base = OTHER; note = 2'-O-N-methyl acetamide modified nucleotide with phosphorothioate linkage
  modified_base 12: mod_base = OTHER; note = 2'-O-N-methyl acetamide modified nucleotide with phosphorothioate linkage
  modified_base 13: mod_base = OTHER; note = 2'-O-N-methyl acetamide modified thymine
  modified_base 14: mod_base = OTHER; note = 2'-O-N-methyl acetamide modified nucleotide with phosphorothioate linkage
  modified_base 15: mod_base = OTHER; note = 2'-O-N-methyl acetamide modified 5-methyl cytosine
  modified_base 16: mod_base = OTHER; note = 2'-O-N-methyl acetamide modified thymine with phosphorothioate linkage
  modified_base 17: mod_base = OTHER; note = 2'-O-N-methyl acetamide modified nucleotide with phosphorothioate linkage
  modified_base 18: mod_base = OTHER; note = 2'-O-N-methyl acetamide modified nucleotide
tcactttcataatgctgg

SEQ ID NO: 190 - RNA, 18 nt, synthetic construct
  source 1..18: mol_type = other RNA
  modified_base 1: mod_base = OTHER; note = 2'-O-N-methyl acetamide modified thymine with phosphorothioate linkage
  modified_base 2: mod_base = OTHER; note = 2'-O-N-methyl acetamide modified 5-methyl cytosine with phosphorothioate linkage
  modified_base 3: mod_base = OTHER; note = 2'-O-N-methyl acetamide modified nucleotide with phosphorothioate linkage
  modified_base 4: mod_base = OTHER; note = 2'-O-N-methyl acetamide modified 5-methyl cytosine with phosphorothioate linkage
  modified_base 5: mod_base = OTHER; note = 2'-O-N-methyl acetamide modified thymine with phosphorothioate linkage
  modified_base 6: mod_base = OTHER; note = 2'-O-N-methyl acetamide modified thymine with phosphorothioate linkage
  modified_base 7: mod_base = OTHER; note = 2'-O-N-methyl acetamide modified thymine with phosphorothioate linkage
  modified_base 8: mod_base = OTHER; note = 2'-O-N-methyl acetamide modified 5-methyl cytosine with phosphorothioate linkage
  modified_base 9: mod_base = OTHER; note = 2'-O-N-methyl acetamide modified nucleotide with phosphorothioate linkage
  modified_base 10: mod_base = OTHER; note = 2'-O-N-methyl acetamide modified thymine with phosphorothioate linkage
  modified_base 11: mod_base = OTHER; note = 2'-O-N-methyl acetamide modified nucleotide with phosphorothioate linkage
  modified_base 12: mod_base = OTHER; note = 2'-O-N-methyl acetamide modified nucleotide
  modified_base 13: mod_base = OTHER; note = 2'-O-N-methyl acetamide modified thymine with phosphorothioate linkage
  modified_base 14: mod_base = OTHER; note = 2'-O-N-methyl acetamide modified nucleotide
  modified_base 15: mod_base = OTHER; note = 2'-O-N-methyl acetamide modified 5-methyl cytosine with phosphorothioate linkage
  modified_base 16: mod_base = OTHER; note = 2'-O-N-methyl acetamide modified thymine with phosphorothioate linkage
  modified_base 17: mod_base = OTHER; note = 2'-O-N-methyl acetamide modified nucleotide with phosphorothioate linkage
  modified_base 18: mod_base = OTHER; note = 2'-O-N-methyl acetamide modified nucleotide
tcactttcataatgctgg

SEQ ID NO: 191 - RNA, 18 nt, synthetic construct
  source 1..18: mol_type = other RNA
  modified_base 1: mod_base = OTHER; note = 2'-O-N-methyl acetamide modified thymine with phosphorothioate linkage
  modified_base 2: mod_base = OTHER; note = 2'-O-N-methyl acetamide modified 5-methyl cytosine with phosphorothioate linkage
  modified_base 3: mod_base = OTHER; note = 2'-O-N-methyl acetamide modified nucleotide with phosphorothioate linkage
  modified_base 4: mod_base = OTHER; note = 2'-O-N-methyl acetamide modified 5-methyl cytosine with phosphorothioate linkage
  modified_base 5: mod_base = OTHER; note = 2'-O-N-methyl acetamide modified thymine with phosphorothioate linkage
  modified_base 6: mod_base = OTHER; note = 2'-O-N-methyl acetamide modified thymine with phosphorothioate linkage
  modified_base 7: mod_base = OTHER; note = 2'-O-N-methyl acetamide modified thymine with phosphorothioate linkage
  modified_base 8: mod_base = OTHER; note = 2'-O-N-methyl acetamide modified 5-methyl cytosine with phosphorothioate linkage
  modified_base 9: mod_base = OTHER; note = 2'-O-N-methyl acetamide modified nucleotide with phosphorothioate linkage
  modified_base 10: mod_base = OTHER; note = 2'-O-N-methyl acetamide modified thymine with phosphorothioate linkage
  modified_base 11: mod_base = OTHER; note = 2'-O-N-methyl acetamide modified nucleotide
  modified_base 12: mod_base = OTHER; note = 2'-O-N-methyl acetamide modified nucleotide with phosphorothioate linkage
  modified_base 13: mod_base = OTHER; note = 2'-O-N-methyl acetamide modified thymine with phosphorothioate linkage
  modified_base 14: mod_base = OTHER; note = 2'-O-N-methyl acetamide modified nucleotide
  modified_base 15: mod_base = OTHER; note = 2'-O-N-methyl acetamide modified 5-methyl cytosine with phosphorothioate linkage
  modified_base 16: mod_base = OTHER; note = 2'-O-N-methyl acetamide modified thymine with phosphorothioate linkage
  modified_base 17: mod_base = OTHER; note = 2'-O-N-methyl acetamide modified nucleotide with phosphorothioate linkage
  modified_base 18: mod_base = OTHER; note = 2'-O-N-methyl acetamide modified nucleotide
tcactttcataatgctgg

SEQ ID NO: 192 - RNA, 18 nt, synthetic construct
  source 1..18: mol_type = other RNA
  modified_base 1: mod_base = OTHER; note = 2'-O-N-methyl acetamide modified thymine with phosphorothioate linkage
  modified_base 2: mod_base = OTHER; note = 2'-O-N-methyl acetamide modified 5-methyl cytosine with phosphorothioate linkage
  modified_base 3: mod_base = OTHER; note = 2'-O-N-methyl acetamide modified nucleotide with phosphorothioate linkage
  modified_base 4: mod_base = OTHER; note = 2'-O-N-methyl acetamide modified 5-methyl cytosine with phosphorothioate linkage
  modified_base 5: mod_base = OTHER; note = 2'-O-N-methyl acetamide modified thymine with phosphorothioate linkage
  modified_base 6: mod_base = OTHER; note = 2'-O-N-methyl acetamide modified thymine with phosphorothioate linkage
  modified_base 7: mod_base = OTHER; note = 2'-O-N-methyl acetamide modified thymine with phosphorothioate linkage
  modified_base 8: mod_base = OTHER; note = 2'-O-N-methyl acetamide modified 5-methyl cytosine with phosphorothioate linkage
  modified_base 9: mod_base = OTHER; note = 2'-O-N-methyl acetamide modified nucleotide with phosphorothioate linkage
  modified_base 10: mod_base = OTHER; note = 2'-O-N-methyl acetamide modified thymine
  modified_base 11: mod_base = OTHER; note = 2'-O-N-methyl acetamide modified nucleotide with phosphorothioate linkage
  modified_base 12: mod_base = OTHER; note = 2'-O-N-methyl acetamide modified nucleotide with phosphorothioate linkage
  modified_base 13: mod_base = OTHER; note = 2'-O-N-methyl acetamide modified thymine with phosphorothioate linkage
  modified_base 14: mod_base = OTHER; note = 2'-O-N-methyl acetamide modified nucleotide
  modified_base 15: mod_base = OTHER; note = 2'-O-N-methyl acetamide modified 5-methyl cytosine with phosphorothioate linkage
  modified_base 16: mod_base = OTHER; note = 2'-O-N-methyl acetamide modified thymine with phosphorothioate linkage
  modified_base 17: mod_base = OTHER; note = 2'-O-N-methyl acetamide modified nucleotide with phosphorothioate linkage
  modified_base 18: mod_base = OTHER; note = 2'-O-N-methyl acetamide modified nucleotide
tcactttcataatgctgg

SEQ ID NO: 193 - RNA, 18 nt, synthetic construct
  source 1..18: mol_type = other RNA
  modified_base 1: mod_base = OTHER; note = 2'-O-N-methyl acetamide modified thymine with phosphorothioate linkage
  modified_base 2: mod_base = OTHER; note = 2'-O-N-methyl acetamide modified 5-methyl cytosine with phosphorothioate linkage
  modified_base 3: mod_base = OTHER; note = 2'-O-N-methyl acetamide modified nucleotide with phosphorothioate linkage
  modified_base 4: mod_base = OTHER; note = 2'-O-N-methyl acetamide modified 5-methyl cytosine with phosphorothioate linkage
  modified_base 5: mod_base = OTHER; note = 2'-O-N-methyl acetamide modified thymine with phosphorothioate linkage
  modified_base 6: mod_base = OTHER; note = 2'-O-N-methyl acetamide modified thymine with phosphorothioate linkage
  modified_base 7: mod_base = OTHER; note = 2'-O-N-methyl acetamide modified thymine with phosphorothioate linkage
  modified_base 8: mod_base = OTHER; note = 2'-O-N-methyl acetamide modified 5-methyl cytosine with phosphorothioate linkage
  modified_base 9: mod_base = OTHER; note = 2'-O-N-methyl acetamide modified nucleotide
  modified_base 10: mod_base = OTHER; note = 2'-O-N-methyl acetamide modified thymine with phosphorothioate linkage
  modified_base 11: mod_base = OTHER; note = 2'-O-N-methyl acetamide modified nucleotide with phosphorothioate linkage
  modified_base 12: mod_base = OTHER; note = 2'-O-N-methyl acetamide modified nucleotide with phosphorothioate linkage
  modified_base 13: mod_base = OTHER; note = 2'-O-N-methyl acetamide modified thymine with phosphorothioate linkage
  modified_base 14: mod_base = OTHER; note = 2'-O-N-methyl acetamide modified nucleotide
  modified_base 15: mod_base = OTHER; note = 2'-O-N-methyl acetamide modified 5-methyl cytosine with phosphorothioate linkage
  modified_base 16: mod_base = OTHER; note = 2'-O-N-methyl acetamide modified thymine with phosphorothioate linkage
  modified_base 17: mod_base = OTHER; note = 2'-O-N-methyl acetamide modified nucleotide with phosphorothioate linkage
  modified_base 18: mod_base = OTHER; note = 2'-O-N-methyl acetamide modified nucleotide
tcactttcataatgctgg

SEQ ID NO: 194 - RNA, 19 nt, synthetic construct
  source 1..19: mol_type = other RNA
  modified_base 1: mod_base = OTHER; note = 2'-O-N-methyl acetamide modified thymine with phosphorothioate linkage
  modified_base 2: mod_base = OTHER; note = 2'-O-N-methyl acetamide modified thymine with phosphorothioate linkage
  modified_base 3: mod_base = OTHER; note = 2'-O-N-methyl acetamide modified 5-methyl cytosine with phosphorothioate linkage
  modified_base 4: mod_base = OTHER; note = 2'-O-N-methyl acetamide modified nucleotide with phosphorothioate linkage
  modified_base 5: mod_base = OTHER; note = 2'-O-N-methyl acetamide modified 5-methyl cytosine with phosphorothioate linkage
  modified_base 6: mod_base = OTHER; note = 2'-O-N-methyl acetamide modified thymine with phosphorothioate linkage
  modified_base 7: mod_base = OTHER; note = 2'-O-N-methyl acetamide modified thymine with phosphorothioate linkage
  modified_base 8: mod_base = OTHER; note = 2'-O-N-methyl acetamide modified thymine with phosphorothioate linkage
  modified_base 9: mod_base = OTHER; note = 2'-O-N-methyl acetamide modified 5-methyl cytosine with phosphorothioate linkage
  modified_base 10: mod_base = OTHER; note = 2'-O-N-methyl acetamide modified nucleotide with phosphorothioate linkage
  modified_base 11: mod_base = OTHER; note = 2'-O-N-methyl acetamide modified thymine with phosphorothioate linkage
  modified_base 12: mod_base = OTHER; note = 2'-O-N-methyl acetamide modified nucleotide with phosphorothioate linkage
  modified_base 13: mod_base = OTHER; note = 2'-O-N-methyl acetamide modified nucleotide with phosphorothioate linkage
  modified_base 14: mod_base = OTHER; note = 2'-O-N-methyl acetamide modified thymine with phosphorothioate linkage
  modified_base 15: mod_base = OTHER; note = 2'-O-N-methyl acetamide modified nucleotide with phosphorothioate linkage
  modified_base 16: mod_base = OTHER; note = 2'-O-N-methyl acetamide modified 5-methyl cytosine with phosphorothioate linkage
  modified_base 17: mod_base = OTHER; note = 2'-O-N-methyl acetamide modified thymine with phosphorothioate linkage
  modified_base 18: mod_base = OTHER; note = 2'-O-N-methyl acetamide modified nucleotide with phosphorothioate linkage
  modified_base 19: mod_base = OTHER; note = 2'-O-N-methyl acetamide modified nucleotide
ttcactttcataatgctgg

SEQ ID NO: 195 - RNA, 19 nt, synthetic construct
  source 1..19: mol_type = other RNA
  modified_base 1: mod_base = OTHER; note = 2'-O-N-methyl acetamide modified thymine with phosphorothioate linkage
  modified_base 2: mod_base = OTHER; note = 2'-O-N-methyl acetamide modified thymine
  modified_base 3: mod_base = OTHER; note = 2'-O-N-methyl acetamide modified 5-methyl cytosine with phosphorothioate linkage
  modified_base 4: mod_base = OTHER; note = 2'-O-N-methyl acetamide modified nucleotide with phosphorothioate linkage
  modified_base 5: mod_base = OTHER; note = 2'-O-N-methyl acetamide modified 5-methyl cytosine with phosphorothioate linkage
  modified_base 6: mod_base = OTHER; note = 2'-O-N-methyl acetamide modified thymine with phosphorothioate linkage
  modified_base 7: mod_base = OTHER; note = 2'-O-N-methyl acetamide modified thymine with phosphorothioate linkage
  modified_base 8: mod_base = OTHER; note = 2'-O-N-methyl acetamide modified thymine with phosphorothioate linkage
  modified_base 9: mod_base = OTHER; note = 2'-O-N-methyl acetamide modified 5-methyl cytosine with phosphorothioate linkage
  modified_base 10: mod_base = OTHER; note = 2'-O-N-methyl acetamide modified nucleotide with phosphorothioate linkage
  modified_base 11: mod_base = OTHER; note = 2'-O-N-methyl acetamide modified thymine with phosphorothioate linkage
  modified_base 12: mod_base = OTHER; note = 2'-O-N-methyl acetamide modified nucleotide with phosphorothioate linkage
  modified_base 13: mod_base = OTHER; note = 2'-O-N-methyl acetamide modified nucleotide with phosphorothioate linkage
  modified_base 14: mod_base = OTHER; note = 2'-O-N-methyl acetamide modified thymine with phosphorothioate linkage
  modified_base 15: mod_base = OTHER; note = 2'-O-N-methyl acetamide modified nucleotide with phosphorothioate linkage
  modified_base 16: mod_base = OTHER; note = 2'-O-N-methyl acetamide modified 5-methyl cytosine
  modified_base 17: mod_base = OTHER; note = 2'-O-N-methyl acetamide modified thymine with phosphorothioate linkage
  modified_base 18: mod_base = OTHER; note = 2'-O-N-methyl acetamide modified nucleotide with phosphorothioate linkage
  modified_base 19: mod_base = OTHER; note = 2'-O-N-methyl acetamide modified nucleotide
ttcactttcataatgctgg

SEQ ID NO: 196 - RNA, 19 nt, synthetic construct
  source 1..19: mol_type = other RNA
  modified_base 1: mod_base = OTHER; note = 2'-O-N-methyl acetamide modified thymine with phosphorothioate linkage
  modified_base 2: mod_base = OTHER; note = 2'-O-N-methyl acetamide modified thymine with phosphorothioate linkage
  modified_base 3: mod_base = OTHER; note = 2'-O-N-methyl acetamide modified 5-methyl cytosine with phosphorothioate linkage
  modified_base 4: mod_base = OTHER; note = 2'-O-N-methyl acetamide modified nucleotide with phosphorothioate linkage
  modified_base 5: mod_base = OTHER; note = 2'-O-N-methyl acetamide modified 5-methyl cytosine with phosphorothioate linkage
  modified_base 6: mod_base = OTHER; note = 2'-O-N-methyl acetamide modified thymine with phosphorothioate linkage
  modified_base 7: mod_base = OTHER; note = 2'-O-N-methyl acetamide modified thymine with phosphorothioate linkage
  modified_base 8: mod_base = OTHER; note = 2'-O-N-methyl acetamide modified thymine with phosphorothioate linkage
  modified_base 9: mod_base = OTHER; note = 2'-O-N-methyl acetamide modified 5-methyl cytosine
  modified_base 10: mod_base = OTHER; note = 2'-O-N-methyl acetamide modified nucleotide with phosphorothioate linkage
  modified_base 11: mod_base = OTHER; note = 2'-O-N-methyl acetamide modified thymine with phosphorothioate linkage
  modified_base 12: mod_base = OTHER; note = 2'-O-N-methyl acetamide modified nucleotide with phosphorothioate linkage
  modified_base 13: mod_base = OTHER; note = 2'-O-N-methyl acetamide modified nucleotide with phosphorothioate linkage
  modified_base 14: mod_base = OTHER; note = 2'-O-N-methyl acetamide modified thymine with phosphorothioate linkage
  modified_base 15: mod_base = OTHER; note = 2'-O-N-methyl acetamide modified nucleotide with phosphorothioate linkage
  modified_base 16: mod_base = OTHER; note = 2'-O-N-methyl acetamide modified 5-methyl cytosine with phosphorothioate linkage
  modified_base 17: mod_base = OTHER; note = 2'-O-N-methyl acetamide modified thymine with phosphorothioate linkage
  modified_base 18: mod_base = OTHER; note = 2'-O-N-methyl acetamide modified nucleotide with phosphorothioate linkage
  modified_base 19: mod_base = OTHER; note = 2'-O-N-methyl acetamide modified nucleotide
ttcactttcataatgctgg

SEQ ID NO: 197 - RNA, 19 nt, synthetic construct
  source 1..19: mol_type = other RNA
  modified_base 1: mod_base = OTHER; note = 2'-O-N-methyl acetamide modified thymine with phosphorothioate linkage
  modified_base 2: mod_base = OTHER; note = 2'-O-N-methyl acetamide modified thymine with phosphorothioate linkage
  modified_base 3: mod_base = OTHER; note = 2'-O-N-methyl acetamide modified 5-methyl cytosine with phosphorothioate linkage
  modified_base 4: mod_base = OTHER; note = 2'-O-N-methyl acetamide modified nucleotide with phosphorothioate linkage
  modified_base 5: mod_base = OTHER; note = 2'-O-N-methyl acetamide modified 5-methyl cytosine with phosphorothioate linkage
  modified_base 6: mod_base = OTHER; note = 2'-O-N-methyl acetamide modified thymine with phosphorothioate linkage
  modified_base 7: mod_base = OTHER; note = 2'-O-N-methyl acetamide modified thymine with phosphorothioate linkage
  modified_base 8: mod_base = OTHER; note = 2'-O-N-methyl acetamide modified thymine with phosphorothioate linkage
  modified_base 9: mod_base = OTHER; note = 2'-O-N-methyl acetamide modified 5-methyl cytosine
  modified_base 10: mod_base = OTHER; note = 2'-O-N-methyl acetamide modified nucleotide with phosphorothioate linkage
  modified_base 11: mod_base = OTHER; note = 2'-O-N-methyl acetamide modified thymine with phosphorothioate linkage
  modified_base 12: mod_base = OTHER; note = 2'-O-N-methyl acetamide modified nucleotide with phosphorothioate linkage
  modified_base 13: mod_base = OTHER; note = 2'-O-N-methyl acetamide modified nucleotide with phosphorothioate linkage
  modified_base 14: mod_base = OTHER; note = 2'-O-N-methyl acetamide modified thymine with phosphorothioate linkage
  modified_base 15: mod_base = OTHER; note = 2'-O-N-methyl acetamide modified nucleotide with phosphorothioate linkage
  modified_base 16: mod_base = OTHER; note = 2'-O-N-methyl acetamide modified 5-methyl cytosine
  modified_base 17: mod_base = OTHER; note = 2'-O-N-methyl acetamide modified thymine with phosphorothioate linkage
  modified_base 18: mod_base = OTHER; note = 2'-O-N-methyl acetamide modified nucleotide with phosphorothioate linkage
  modified_base 19: mod_base = OTHER; note = 2'-O-N-methyl acetamide modified nucleotide
ttcactttcataatgctgg

SEQ ID NO: 198 - RNA, 19 nt, synthetic construct
  source 1..19: mol_type = other RNA
  modified_base 1: mod_base = OTHER; note = 2'-O-N-methyl acetamide modified thymine with phosphorothioate linkage
  modified_base 2: mod_base = OTHER; note = 2'-O-N-methyl acetamide modified thymine with phosphorothioate linkage
  modified_base 3: mod_base = OTHER; note = 2'-O-N-methyl acetamide modified 5-methyl cytosine with phosphorothioate linkage
  modified_base 4: mod_base = OTHER; note = 2'-O-N-methyl acetamide modified nucleotide with phosphorothioate linkage
  modified_base 5: mod_base = OTHER; note = 2'-O-N-methyl acetamide modified 5-methyl cytosine with phosphorothioate linkage
  modified_base 6: mod_base = OTHER; note = 2'-O-N-methyl acetamide modified thymine with phosphorothioate linkage
  modified_base 7: mod_base = OTHER; note = 2'-O-N-methyl acetamide modified thymine with phosphorothioate linkage
  modified_base 8: mod_base = OTHER; note = 2'-O-N-methyl acetamide modified thymine with phosphorothioate linkage
  modified_base 9: mod_base = OTHER; note = 2'-O-N-methyl acetamide modified 5-methyl cytosine with phosphorothioate linkage
  modified_base 10: mod_base = OTHER; note = 2'-O-N-methyl acetamide modified nucleotide with phosphorothioate linkage
  modified_base 11: mod_base = OTHER; note = 2'-O-N-methyl acetamide modified thymine with phosphorothioate linkage
  modified_base 12: mod_base = OTHER; note = 2'-O-N-methyl acetamide modified nucleotide with phosphorothioate linkage
  modified_base 13: mod_base = OTHER; note = 2'-O-N-methyl acetamide modified nucleotide with phosphorothioate linkage
  modified_base 14: mod_base = OTHER; note = 2'-O-N-methyl acetamide modified thymine with phosphorothioate linkage
  modified_base 15: mod_base = OTHER; note = 2'-O-N-methyl acetamide modified nucleotide with phosphorothioate linkage
  modified_base 16: mod_base = OTHER; note = 2'-O-N-methyl acetamide modified 5-methyl cytosine
  modified_base 17: mod_base = OTHER; note = 2'-O-N-methyl acetamide modified thymine with phosphorothioate linkage
  modified_base 18: mod_base = OTHER; note = 2'-O-N-methyl acetamide modified nucleotide with phosphorothioate linkage
  modified_base 19: mod_base = OTHER; note = 2'-O-N-methyl acetamide modified nucleotide
ttcactttcataatgctgg

SEQ ID NO: 199 - RNA, 19 nt, synthetic construct
  source 1..19: mol_type = other RNA
  modified_base 1: mod_base = OTHER; note = 2'-O-N-methyl acetamide modified thymine with phosphorothioate linkage
  modified_base 2: mod_base = OTHER; note = 2'-O-N-methyl acetamide modified thymine with phosphorothioate linkage
  modified_base 3: mod_base = OTHER; note = 2'-O-N-methyl acetamide modified 5-methyl cytosine with phosphorothioate linkage
  modified_base 4: mod_base = OTHER; note = 2'-O-N-methyl acetamide modified nucleotide with phosphorothioate linkage
  modified_base 5: mod_base = OTHER; note = 2'-O-N-methyl acetamide modified 5-methyl cytosine with phosphorothioate linkage
  modified_base 6: mod_base = OTHER; note = 2'-O-N-methyl acetamide modified thymine with phosphorothioate linkage
  modified_base 7: mod_base = OTHER; note = 2'-O-N-methyl acetamide modified thymine with phosphorothioate linkage
  modified_base 8: mod_base = OTHER; note = 2'-O-N-methyl acetamide modified thymine with phosphorothioate linkage
  modified_base 9: mod_base = OTHER; note = 2'-O-N-methyl acetamide modified 5-methyl cytosine with phosphorothioate linkage
  modified_base 10: mod_base = OTHER; note = 2'-O-N-methyl acetamide modified nucleotide with phosphorothioate linkage
  modified_base 11: mod_base = OTHER; note = 2'-O-N-methyl acetamide modified thymine with phosphorothioate linkage
  modified_base 12: mod_base = OTHER; note = 2'-O-N-methyl acetamide modified nucleotide with phosphorothioate linkage
  modified_base 13: mod_base = OTHER; note = 2'-O-N-methyl acetamide modified nucleotide with phosphorothioate linkage
  modified_base 14: mod_base = OTHER; note = 2'-O-N-methyl acetamide modified thymine
  modified_base 15: mod_base = OTHER; note = 2'-O-N-methyl acetamide modified nucleotide with phosphorothioate linkage
  modified_base 16: mod_base = OTHER; note = 2'-O-N-methyl acetamide modified 5-methyl cytosine
  modified_base 17: mod_base = OTHER; note = 2'-O-N-methyl acetamide modified thymine with phosphorothioate linkage
  modified_base 18: mod_base = OTHER; note = 2'-O-N-methyl acetamide modified nucleotide with phosphorothioate linkage
  modified_base 19: mod_base = OTHER; note = 2'-O-N-methyl acetamide modified nucleotide
ttcactttcataatgctgg

SEQ ID NO: 200 - RNA, 19 nt, synthetic construct
  source 1..19: mol_type = other RNA
  modified_base 1: mod_base = OTHER; note = 2'-O-N-methyl acetamide modified thymine with phosphorothioate linkage
  modified_base 2: mod_base = OTHER; note = 2'-O-N-methyl acetamide modified thymine with phosphorothioate linkage
  modified_base 3: mod_base = OTHER; note = 2'-O-N-methyl acetamide modified 5-methyl cytosine with phosphorothioate linkage
  modified_base 4: mod_base = OTHER; note = 2'-O-N-methyl acetamide modified nucleotide with phosphorothioate linkage
  modified_base 5: mod_base = OTHER; note = 2'-O-N-methyl acetamide modified 5-methyl cytosine with phosphorothioate linkage
  modified_base 6: mod_base = OTHER; note = 2'-O-N-methyl acetamide modified thymine with phosphorothioate linkage
  modified_base 7: mod_base = OTHER; note = 2'-O-N-methyl acetamide modified thymine with phosphorothioate linkage
  modified_base 8: mod_base = OTHER; note = 2'-O-N-methyl acetamide modified thymine with phosphorothioate linkage
  modified_base 9: mod_base = OTHER; note = 2'-O-N-methyl acetamide modified 5-methyl cytosine with phosphorothioate linkage
  modified_base 10: mod_base = OTHER; note = 2'-O-N-methyl acetamide modified nucleotide with phosphorothioate linkage
  modified_base 11: mod_base = OTHER; note = 2'-O-N-methyl acetamide modified thymine with phosphorothioate linkage
  modified_base 12: mod_base = OTHER; note = 2'-O-N-methyl acetamide modified nucleotide with phosphorothioate linkage
  modified_base 13: mod_base = OTHER; note = 2'-O-N-methyl acetamide modified nucleotide with phosphorothioate linkage
  modified_base 14: mod_base = OTHER; note = 2'-O-N-methyl acetamide modified thymine with phosphorothioate linkage
  modified_base 15: mod_base = OTHER; note = 2'-O-N-methyl acetamide modified nucleotide
  modified_base 16: mod_base = OTHER; note = 2'-O-N-methyl acetamide modified 5-methyl cytosine
  modified_base 17: mod_base = OTHER; note = 2'-O-N-methyl acetamide modified thymine with phosphorothioate linkage
  modified_base 18: mod_base = OTHER; note = 2'-O-N-methyl acetamide modified nucleotide with phosphorothioate linkage
  modified_base 19: mod_base = OTHER; note = 2'-O-N-methyl acetamide modified nucleotide
ttcactttcataatgctgg

SEQ ID NO: 201 - RNA, 20 nt, synthetic construct
  source 1..20: mol_type = other RNA
  modified_base 1: mod_base = OTHER; note = 2'-O-N-methyl acetamide modified nucleotide with phosphorothioate linkage
  modified_base 2: mod_base = OTHER; note = 2'-O-N-methyl acetamide modified thymine with phosphorothioate linkage
  modified_base 3: mod_base = OTHER; note = 2'-O-N-methyl acetamide modified thymine with phosphorothioate linkage
  modified_base 4: mod_base = OTHER; note = 2'-O-N-methyl acetamide modified 5-methyl cytosine with phosphorothioate linkage
  modified_base 5: mod_base = OTHER; note = 2'-O-N-methyl acetamide modified nucleotide with phosphorothioate linkage
  modified_base 6: mod_base = OTHER; note = 2'-O-N-methyl acetamide modified 5-methyl cytosine with phosphorothioate linkage
  modified_base 7: mod_base = OTHER; note = 2'-O-N-methyl acetamide modified thymine with phosphorothioate linkage
  modified_base 8: mod_base = OTHER; note = 2'-O-N-methyl acetamide modified thymine with phosphorothioate linkage
  modified_base 9: mod_base = OTHER; note = 2'-O-N-methyl acetamide modified thymine with phosphorothioate linkage
  modified_base 10: mod_base = OTHER; note = 2'-O-N-methyl acetamide modified 5-methyl cytosine with phosphorothioate linkage
  modified_base 11: mod_base = OTHER; note = 2'-O-N-methyl acetamide modified nucleotide with phosphorothioate linkage
  modified_base 12: mod_base = OTHER; note = 2'-O-N-methyl acetamide modified thymine with phosphorothioate linkage
  modified_base 13: mod_base = OTHER; note = 2'-O-N-methyl acetamide modified nucleotide with phosphorothioate linkage
  modified_base 14: mod_base = OTHER; note = 2'-O-N-methyl acetamide modified nucleotide with phosphorothioate linkage
  modified_base 15: mod_base = OTHER; note = 2'-O-N-methyl acetamide modified thymine with phosphorothioate linkage
  modified_base 16: mod_base = OTHER; note = 2'-O-N-methyl acetamide modified nucleotide with phosphorothioate linkage
  modified_base 17: mod_base = OTHER; note = 2'-O-N-methyl acetamide modified 5-methyl cytosine with phosphorothioate linkage
  modified_base 18: mod_base = OTHER; note = 2'-O-N-methyl acetamide modified thymine with phosphorothioate linkage
  modified_base 19: mod_base = OTHER; note = 2'-O-N-methyl acetamide modified nucleotide with phosphorothioate linkage
  modified_base 20: mod_base = OTHER; note = 2'-O-N-methyl acetamide modified nucleotide
attcactttcataatgctgg

SEQ ID NO: 202 - RNA, 20 nt, synthetic construct
  source 1..20: mol_type = other RNA
  modified_base 1: mod_base = OTHER; note = 2'-O-N-methyl acetamide modified nucleotide with phosphorothioate linkage
  modified_base 2: mod_base = OTHER; note = 2'-O-N-methyl acetamide modified thymine
  modified_base 3: mod_base = OTHER; note = 2'-O-N-methyl acetamide modified thymine with phosphorothioate linkage
  modified_base 4: mod_base = OTHER; note = 2'-O-N-methyl acetamide modified 5-methyl cytosine with phosphorothioate linkage
  modified_base 5: mod_base = OTHER; note = 2'-O-N-methyl acetamide modified nucleotide with phosphorothioate linkage
  modified_base 6: mod_base = OTHER; note = 2'-O-N-methyl acetamide modified 5-methyl cytosine with phosphorothioate linkage
  modified_base 7: mod_base = OTHER; note = 2'-O-N-methyl acetamide modified thymine with phosphorothioate linkage
  modified_base 8: mod_base = OTHER; note = 2'-O-N-methyl acetamide modified thymine with phosphorothioate linkage
  modified_base 9: mod_base = OTHER; note = 2'-O-N-methyl acetamide modified thymine with phosphorothioate linkage
  modified_base 10: mod_base = OTHER; note = 2'-O-N-methyl acetamide modified 5-methyl cytosine with phosphorothioate linkage
  modified_base 11: mod_base = OTHER; note = 2'-O-N-methyl acetamide modified nucleotide with phosphorothioate linkage
  modified_base 12: mod_base = OTHER; note = 2'-O-N-methyl acetamide modified thymine with phosphorothioate linkage
  modified_base 13: mod_base = OTHER; note = 2'-O-N-methyl acetamide modified nucleotide with phosphorothioate linkage
  modified_base 14: mod_base = OTHER; note = 2'-O-N-methyl acetamide modified nucleotide with phosphorothioate linkage
  modified_base 15: mod_base = OTHER; note = 2'-O-N-methyl acetamide modified thymine with phosphorothioate linkage
  modified_base 16: mod_base = OTHER; note = 2'-O-N-methyl acetamide modified nucleotide with phosphorothioate linkage
  modified_base 17: mod_base = OTHER; note = 2'-O-N-methyl acetamide modified 5-methyl cytosine
  modified_base 18: mod_base = OTHER; note = 2'-O-N-methyl acetamide modified thymine with phosphorothioate linkage
  modified_base 19: mod_base = OTHER; note = 2'-O-N-methyl acetamide modified nucleotide with phosphorothioate linkage
  modified_base 20: mod_base = OTHER; note = 2'-O-N-methyl acetamide modified nucleotide
attcactttcataatgctgg

SEQ ID NO: 203 - RNA, 20 nt, synthetic construct
  source 1..20: mol_type = other RNA
  modified_base 1: mod_base = OTHER; note = 2'-O-N-methyl acetamide modified nucleotide with phosphorothioate linkage
  modified_base 2: mod_base = OTHER; note = 2'-O-N-methyl acetamide modified thymine with phosphorothioate linkage
  modified_base 3: mod_base = OTHER; note = 2'-O-N-methyl acetamide modified thymine with phosphorothioate linkage
  modified_base 4: mod_base = OTHER; note = 2'-O-N-methyl acetamide modified 5-methyl cytosine with phosphorothioate linkage
  modified_base 5: mod_base = OTHER; note = 2'-O-N-methyl acetamide modified nucleotide with phosphorothioate linkage
  modified_base 6: mod_base = OTHER; note = 2'-O-N-methyl acetamide modified 5-methyl cytosine with phosphorothioate linkage
  modified_base 7: mod_base = OTHER; note = 2'-O-N-methyl acetamide modified thymine with phosphorothioate linkage
  modified_base 8: mod_base = OTHER; note = 2'-O-N-methyl acetamide modified thymine with phosphorothioate linkage
  modified_base 9: mod_base = OTHER; note = 2'-O-N-methyl acetamide modified thymine with phosphorothioate linkage
  modified_base 10: mod_base = OTHER; note = 2'-O-N-methyl acetamide modified 5-methyl cytosine
  modified_base 11: mod_base = OTHER; note = 2'-O-N-methyl acetamide modified nucleotide with phosphorothioate linkage
  modified_base 12: mod_base = OTHER; note = 2'-O-N-methyl acetamide modified thymine with phosphorothioate linkage
  modified_base 13: mod_base = OTHER; note = 2'-O-N-methyl acetamide modified nucleotide with phosphorothioate linkage
  modified_base 14: mod_base = OTHER; note = 2'-O-N-methyl acetamide modified nucleotide with phosphorothioate linkage
  modified_base 15: mod_base = OTHER; note = 2'-O-N-methyl acetamide modified thymine with phosphorothioate linkage
  modified_base 16: mod_base = OTHER; note = 2'-O-N-methyl acetamide modified nucleotide with phosphorothioate linkage
  modified_base 17: mod_base = OTHER; note = 2'-O-N-methyl acetamide modified 5-methyl cytosine with phosphorothioate linkage
  modified_base 18: mod_base = OTHER; note = 2'-O-N-methyl acetamide modified thymine with phosphorothioate linkage
  modified_base 19: mod_base = OTHER; note = 2'-O-N-methyl acetamide modified nucleotide with phosphorothioate linkage
  modified_base 20: mod_base = OTHER; note = 2'-O-N-methyl acetamide modified nucleotide
attcactttcataatgctgg

SEQ ID NO: 204 - RNA, 20 nt, synthetic construct
  source 1..20: mol_type = other RNA
  modified_base 1: mod_base = OTHER; note = 2'-O-N-methyl acetamide modified nucleotide with phosphorothioate linkage
  modified_base 2: mod_base = OTHER; note = 2'-O-N-methyl acetamide modified thymine with phosphorothioate linkage
  modified_base 3: mod_base = OTHER; note = 2'-O-N-methyl acetamide modified thymine with phosphorothioate linkage
  modified_base 4: mod_base = OTHER; note = 2'-O-N-methyl acetamide modified 5-methyl cytosine with phosphorothioate linkage
  modified_base 5: mod_base = OTHER; note = 2'-O-N-methyl acetamide modified nucleotide with phosphorothioate linkage
  modified_base 6: mod_base = OTHER; note = 2'-O-N-methyl acetamide modified 5-methyl cytosine with phosphorothioate linkage
  modified_base 7: mod_base = OTHER; note = 2'-O-N-methyl acetamide modified thymine with phosphorothioate linkage
  modified_base 8: mod_base = OTHER; note = 2'-O-N-methyl acetamide modified thymine with phosphorothioate linkage
  modified_base 9: mod_base = OTHER; note = 2'-O-N-methyl acetamide modified thymine with phosphorothioate linkage
  modified_base 10: mod_base = OTHER; note = 2'-O-N-methyl acetamide modified 5-methyl cytosine with phosphorothioate linkage
  modified_base 11: mod_base = OTHER; note = 2'-O-N-methyl acetamide modified nucleotide with phosphorothioate linkage
  modified_base 12: mod_base = OTHER; note = 2'-O-N-methyl acetamide modified thymine with phosphorothioate linkage
  modified_base 13: mod_base = OTHER; note = 2'-O-N-methyl acetamide modified nucleotide with phosphorothioate linkage
  modified_base 14: mod_base = OTHER; note = 2'-O-N-methyl acetamide modified nucleotide with phosphorothioate linkage
  modified_base 15: mod_base = OTHER; note = 2'-O-N-methyl acetamide modified thymine with phosphorothioate linkage
  modified_base 16: mod_base = OTHER; note = 2'-O-N-methyl acetamide modified nucleotide with phosphorothioate linkage
  modified_base 17: mod_base = OTHER; note = 2'-O-N-methyl acetamide modified 5-methyl cytosine
  modified_base 18: mod_base = OTHER; note = 2'-O-N-methyl acetamide modified thymine with phosphorothioate linkage
  modified_base 19: mod_base = OTHER; note = 2'-O-N-methyl acetamide modified nucleotide with phosphorothioate linkage
  modified_base 20: mod_base = OTHER; note = 2'-O-N-methyl acetamide modified nucleotide
attcactttcataatgctgg

SEQ ID NO: 205 - RNA, 20 nt, synthetic construct
  source 1..20: mol_type = other RNA
  modified_base 1: mod_base = OTHER; note = 2'-O-N-methyl acetamide modified nucleotide with phosphorothioate linkage
  modified_base 2: mod_base = OTHER; note = 2'-O-N-methyl acetamide modified thymine with phosphorothioate linkage
  modified_base 3: mod_base = OTHER; note = 2'-O-N-methyl acetamide modified thymine with phosphorothioate linkage
  modified_base 4: mod_base = OTHER; note = 2'-O-N-methyl acetamide modified 5-methyl cytosine with phosphorothioate linkage
  modified_base 5: mod_base = OTHER; note = 2'-O-N-methyl acetamide modified nucleotide with phosphorothioate linkage
  modified_base 6: mod_base = OTHER; note = 2'-O-N-methyl acetamide modified 5-methyl cytosine with phosphorothioate linkage
  modified_base 7: mod_base = OTHER; note = 2'-O-N-methyl acetamide modified thymine with phosphorothioate linkage
  modified_base 8: mod_base = OTHER; note = 2'-O-N-methyl acetamide modified thymine with phosphorothioate linkage
  modified_base 9: mod_base = OTHER; note = 2'-O-N-methyl acetamide modified thymine with phosphorothioate linkage
  modified_base 10: mod_base = OTHER; note = 2'-O-N-methyl acetamide modified 5-methyl cytosine with phosphorothioate linkage
  modified_base 11: mod_base = OTHER; note = 2'-O-N-methyl acetamide modified nucleotide with phosphorothioate linkage
  modified_base 12: mod_base = OTHER; note = 2'-O-N-methyl acetamide modified thymine with phosphorothioate linkage
  modified_base 13: mod_base = OTHER; note = 2'-O-N-methyl acetamide modified nucleotide with phosphorothioate linkage
  modified_base 14: mod_base = OTHER; note = 2'-O-N-methyl acetamide modified nucleotide with phosphorothioate linkage
  modified_base 15: mod_base = OTHER; note = 2'-O-N-methyl acetamide modified thymine with phosphorothioate linkage
  modified_base 16: mod_base = OTHER; note = 2'-O-N-methyl acetamide modified nucleotide
  modified_base 17: mod_base = OTHER; note = 2'-O-N-methyl acetamide modified 5-methyl cytosine
  modified_base 18: mod_base = OTHER; note = 2'-O-N-methyl acetamide modified thymine with phosphorothioate linkage
  modified_base 19: mod_base = OTHER; note = 2'-O-N-methyl acetamide modified nucleotide with phosphorothioate linkage
  modified_base 20: mod_base = OTHER; note = 2'-O-N-methyl acetamide modified nucleotide
attcactttcataatgctgg

SEQ ID NO: 206 - RNA, 20 nt, synthetic construct
  source 1..20: mol_type = other RNA
  modified_base 1: mod_base = OTHER; note = 2'-O-N-methyl acetamide modified nucleotide with phosphorothioate linkage
  modified_base 2: mod_base = OTHER; note = 2'-O-N-methyl acetamide modified thymine with phosphorothioate linkage
  modified_base 3: mod_base = OTHER; note = 2'-O-N-methyl acetamide modified thymine with phosphorothioate linkage
  modified_base 4: mod_base = OTHER; note = 2'-O-N-methyl acetamide modified 5-methyl cytosine with phosphorothioate linkage
  modified_base 5: mod_base = OTHER; note = 2'-O-N-methyl acetamide modified nucleotide with phosphorothioate linkage
  modified_base 6: mod_base = OTHER; note = 2'-O-N-methyl acetamide modified 5-methyl cytosine with phosphorothioate linkage
  modified_base 7: mod_base = OTHER; note = 2'-O-N-methyl acetamide modified thymine with phosphorothioate linkage
  modified_base 8: mod_base = OTHER; note = 2'-O-N-methyl acetamide modified thymine with phosphorothioate linkage
  modified_base 9: mod_base = OTHER; note = 2'-O-N-methyl acetamide modified thymine with phosphorothioate linkage
  modified_base 10: mod_base = OTHER; note = 2'-O-N-methyl acetamide modified 5-methyl cytosine with phosphorothioate linkage
  modified_base 11: mod_base = OTHER; note = 2'-O-N-methyl acetamide modified nucleotide with phosphorothioate linkage
  modified_base 12: mod_base = OTHER; note = 2'-O-N-methyl acetamide modified thymine with phosphorothioate linkage
  modified_base 13: mod_base = OTHER; note = 2'-O-N-methyl acetamide modified nucleotide with phosphorothioate linkage
  modified_base 14: mod_base = OTHER; note = 2'-O-N-methyl acetamide modified nucleotide with phosphorothioate linkage
  modified_base 15: mod_base = OTHER; note = 2'-O-N-methyl acetamide modified thymine
  modified_base 16: mod_base = OTHER; note = 2'-O-N-methyl acetamide modified nucleotide with phosphorothioate linkage
  modified_base 17: mod_base = OTHER; note = 2'-O-N-methyl acetamide modified 5-methyl cytosine
  modified_base 18: mod_base = OTHER; note = 2'-O-N-methyl acetamide modified thymine with phosphorothioate linkage
  modified_base 19: mod_base = OTHER; note = 2'-O-N-methyl acetamide modified nucleotide with phosphorothioate linkage
  modified_base 20: mod_base = OTHER; note = 2'-O-N-methyl acetamide modified nucleotide
attcactttcataatgctgg

SEQ ID NO: 207 - RNA, 20 nt, synthetic construct
  source 1..20: mol_type = other RNA
  modified_base 1: mod_base = OTHER; note = 2'-O-N-methyl acetamide modified nucleotide with phosphorothioate linkage
  modified_base 2: mod_base = OTHER; note = 2'-O-N-methyl acetamide modified thymine with phosphorothioate linkage
  modified_base 3: mod_base = OTHER; note = 2'-O-N-methyl acetamide modified thymine with phosphorothioate linkage
  modified_base 4: mod_base = OTHER; note = 2'-O-N-methyl acetamide modified 5-methyl cytosine with phosphorothioate linkage
  modified_base 5: mod_base = OTHER; note = 2'-O-N-methyl acetamide modified nucleotide with phosphorothioate linkage
  modified_base 6: mod_base = OTHER; note = 2'-O-N-methyl acetamide modified 5-methyl cytosine with phosphorothioate linkage
  modified_base 7: mod_base = OTHER; note = 2'-O-N-methyl acetamide modified thymine with phosphorothioate linkage
  modified_base 8: mod_base = OTHER; note = 2'-O-N-methyl acetamide modified thymine with phosphorothioate linkage
  modified_base 9: mod_base = OTHER; note = 2'-O-N-methyl acetamide modified thymine with phosphorothioate linkage
  modified_base 10: mod_base = OTHER; note = 2'-O-N-methyl acetamide modified 5-methyl cytosine
  modified_base 11: mod_base = OTHER; note = 2'-O-N-methyl acetamide modified nucleotide with phosphorothioate linkage
  modified_base 12: mod_base = OTHER; note = 2'-O-N-methyl acetamide modified thymine with phosphorothioate linkage
  modified_base 13: mod_base = OTHER; note = 2'-O-N-methyl acetamide modified nucleotide with phosphorothioate linkage
  modified_base 14: mod_base = OTHER; note = 2'-O-N-methyl acetamide modified nucleotide with phosphorothioate linkage
  modified_base 15: mod_base = OTHER; note = 2'-O-N-methyl acetamide modified thymine with phosphorothioate linkage
  modified_base 16: mod_base = OTHER; note = 2'-O-N-methyl acetamide modified nucleotide with phosphorothioate linkage
  modified_base 17: mod_base = OTHER; note = 2'-O-N-methyl acetamide modified 5-methyl cytosine
  modified_base 18: mod_base = OTHER; note = 2'-O-N-methyl acetamide modified thymine with phosphorothioate linkage
  modified_base 19: mod_base = OTHER; note = 2'-O-N-methyl acetamide modified nucleotide with phosphorothioate linkage
  modified_base 20: mod_base = OTHER; note = 2'-O-N-methyl acetamide modified nucleotide
attcactttcataatgctgg

SEQ ID NO: 208 - RNA, 20 nt, synthetic construct
  source 1..20: mol_type = other RNA
  modified_base 1: mod_base = OTHER; note = 2'-O-N-methyl acetamide modified thymine with phosphorothioate linkage
  modified_base 2: mod_base = OTHER; note = 2'-O-N-methyl acetamide modified thymine with phosphorothioate linkage
  modified_base 3: mod_base = OTHER; note = 2'-O-N-methyl acetamide modified 5-methyl cytosine with phosphorothioate linkage
  modified_base 4: mod_base = OTHER; note = 2'-O-N-methyl acetamide modified nucleotide with phosphorothioate linkage
  modified_base 5: mod_base = OTHER; note = 2'-O-N-methyl acetamide modified 5-methyl cytosine with phosphorothioate linkage
  modified_base 6: mod_base = OTHER; note = 2'-O-N-methyl acetamide modified thymine with phosphorothioate linkage
  modified_base 7: mod_base = OTHER; note = 2'-O-N-methyl acetamide modified thymine with phosphorothioate linkage
  modified_base 8: mod_base = OTHER; note = 2'-O-N-methyl acetamide modified thymine with phosphorothioate linkage
  modified_base 9: mod_base = OTHER; note = 2'-O-N-methyl acetamide modified 5-methyl cytosine with phosphorothioate linkage
  modified_base 10: mod_base = OTHER; note = 2'-O-N-methyl acetamide modified nucleotide with phosphorothioate linkage
  modified_base 11: mod_base = OTHER; note = 2'-O-N-methyl acetamide modified thymine with phosphorothioate linkage
  modified_base 12: mod_base = OTHER; note = 2'-O-N-methyl acetamide modified nucleotide with phosphorothioate linkage
  modified_base 13: mod_base = OTHER; note = 2'-O-N-methyl acetamide modified nucleotide with phosphorothioate linkage
  modified_base 14: mod_base = OTHER; note = 2'-O-N-methyl acetamide modified thymine with phosphorothioate linkage
  modified_base 15: mod_base = OTHER; note = 2'-O-N-methyl acetamide modified nucleotide with phosphorothioate linkage
  modified_base 16: mod_base = OTHER; note = 2'-O-N-methyl acetamide modified 5-methyl cytosine with phosphorothioate linkage
  modified_base 17: mod_base = OTHER; note = 2'-O-N-methyl acetamide modified thymine with phosphorothioate linkage
  modified_base 18: mod_base = OTHER; note = 2'-O-N-methyl acetamide modified nucleotide with phosphorothioate linkage
  modified_base 19: mod_base = OTHER; note = 2'-O-N-methyl acetamide modified nucleotide with phosphorothioate linkage
  modified_base 20: mod_base = OTHER; note = 2'-O-N-methyl acetamide modified 5-methyl cytosine
ttcactttcataatgctggc

SEQ ID NO: 209 - RNA, 18 nt, synthetic construct
  source 1..18: mol_type = other RNA
  modified_base 1: mod_base = OTHER; note = 2'-O-N-methyl acetamide modified 5-methyl cytosine with phosphorothioate linkage
  modified_base 2: mod_base = OTHER; note = 2'-O-methoxyethyl modified nucleotide with phosphorothioate linkage
  modified_base 3: mod_base = OTHER; note = 2'-O-N-methyl acetamide modified 5-methyl cytosine with phosphorothioate linkage
  modified_base 4: mod_base = OTHER; note = 2'-O-N-methyl acetamide modified thymine with phosphorothioate linkage
  modified_base 5: mod_base = OTHER; note = 2'-O-N-methyl acetamide modified thymine with phosphorothioate linkage
  modified_base 6: mod_base = OTHER; note = 2'-O-N-methyl acetamide modified thymine with phosphorothioate linkage
  modified_base 7: mod_base = OTHER; note = 2'-O-N-methyl acetamide modified 5-methyl cytosine with phosphorothioate linkage
  modified_base 8: mod_base = OTHER; note = 2'-O-methoxyethyl modified nucleotide with phosphorothioate linkage
  modified_base 9: mod_base = OTHER; note = 2'-O-N-methyl acetamide modified thymine with phosphorothioate linkage
  modified_base 10: mod_base = OTHER; note = 2'-O-methoxyethyl modified nucleotide with phosphorothioate linkage
  modified_base 11: mod_base = OTHER; note = 2'-O-methoxyethyl modified nucleotide with phosphorothioate linkage
  modified_base 12: mod_base = OTHER; note = 2'-O-N-methyl acetamide modified thymine with phosphorothioate linkage
  modified_base 13: mod_base = OTHER; note = 2'-O-N-methyl acetamide modified nucleotide with phosphorothioate linkage
  modified_base 14: mod_base = OTHER; note = 2'-O-N-methyl acetamide modified 5-methyl cytosine with phosphorothioate linkage
  modified_base 15: mod_base = OTHER; note = 2'-O-N-methyl acetamide modified thymine with phosphorothioate linkage
  modified_base 16: mod_base = OTHER; note = 2'-O-N-methyl acetamide modified nucleotide with phosphorothioate linkage
  modified_base 17: mod_base = OTHER; note = 2'-O-N-methyl acetamide modified nucleotide with phosphorothioate linkage
  modified_base 18: mod_base = OTHER; note = 2'-O-N-methyl acetamide modified 5-methyl cytosine
cactttcataatgctggc

SEQ ID NO: 210 - RNA, 18 nt, synthetic construct
  source 1..18: mol_type = other RNA
  modified_base 1: mod_base = OTHER; note = 2'-O-N-methyl acetamide modified 5-methyl cytosine with phosphorothioate linkage
  modified_base 2: mod_base = OTHER; note = 2'-O-N-methyl acetamide modified nucleotide with phosphorothioate linkage
  modified_base 3: mod_base = OTHER; note = 2'-O-N-methyl acetamide modified 5-methyl cytosine with phosphorothioate linkage
  modified_base 4: mod_base = OTHER; note = 2'-O-N-methyl acetamide modified thymine with phosphorothioate linkage
  modified_base 5: mod_base = OTHER; note = 2'-O-N-methyl acetamide modified thymine with phosphorothioate linkage
  modified_base 6: mod_base = OTHER; note = 2'-O-N-methyl acetamide modified thymine with phosphorothioate linkage
  modified_base 7: mod_base = OTHER; note = 2'-O-N-methyl acetamide modified 5-methyl cytosine with phosphorothioate linkage
  modified_base 8: mod_base = OTHER; note = 2'-O-N-methyl acetamide modified nucleotide with phosphorothioate linkage
  modified_base 9: mod_base = OTHER; note = 2'-O-N-methyl acetamide modified thymine with phosphorothioate linkage
  modified_base 10: mod_base = OTHER; note = 2'-O-N-methyl acetamide modified nucleotide with phosphorothioate linkage
  modified_base 11: mod_base = OTHER; note = 2'-O-N-methyl acetamide modified nucleotide with phosphorothioate linkage
  modified_base 12: mod_base = OTHER; note = 2'-O-N-methyl acetamide modified thymine with phosphorothioate linkage
  modified_base 13: mod_base = OTHER; note = 2'-O-methoxyethyl modified nucleotide with phosphorothioate linkage
  modified_base 14: mod_base = OTHER; note = 2'-O-N-methyl acetamide modified 5-methyl cytosine with phosphorothioate linkage
  modified_base 15: mod_base = OTHER; note = 2'-O-N-methyl acetamide modified thymine with phosphorothioate linkage
  modified_base 16: mod_base = OTHER; note = 2'-O-methoxyethyl modified nucleotide with phosphorothioate linkage
  modified_base 17: mod_base = OTHER; note = 2'-O-methoxyethyl modified nucleotide with phosphorothioate linkage
  modified_base 18: mod_base = OTHER; note = 2'-O-N-methyl acetamide modified 5-methyl cytosine
cactttcataatgctggc

SEQ ID NO: 211 - RNA, 18 nt, synthetic construct
  source 1..18: mol_type = other RNA
  modified_base 1: mod_base = OTHER; note = 2'-O-N-methyl acetamide modified 5-methyl cytosine with phosphorothioate linkage
  modified_base 2: mod_base = OTHER; note = 2'-O-methoxyethyl modified nucleotide with phosphorothioate linkage
  modified_base 3: mod_base = OTHER; note = 2'-O-N-methyl acetamide modified 5-methyl cytosine with phosphorothioate linkage
  modified_base 4: mod_base = OTHER; note = 2'-O-N-methyl acetamide modified thymine with phosphorothioate linkage
  modified_base 5: mod_base = OTHER; note = 2'-O-N-methyl acetamide modified thymine with phosphorothioate linkage
  modified_base 6: mod_base = OTHER; note = 2'-O-N-methyl acetamide modified thymine with phosphorothioate linkage
  modified_base 7: mod_base = OTHER; note = 2'-O-N-methyl acetamide modified 5-methyl cytosine with phosphorothioate linkage
  modified_base 8: mod_base = OTHER; note = 2'-O-methoxyethyl modified nucleotide with phosphorothioate linkage
  modified_base 9: mod_base = OTHER; note = 2'-O-N-methyl acetamide modified thymine with phosphorothioate linkage
  modified_base 10: mod_base = OTHER; note = 2'-O-methoxyethyl modified nucleotide with phosphorothioate linkage
  modified_base 11: mod_base = OTHER; note = 2'-O-methoxyethyl modified nucleotide with phosphorothioate linkage
  modified_base 12: mod_base = OTHER; note = 2'-O-N-methyl acetamide modified thymine with phosphorothioate linkage
  modified_base 13: mod_base = OTHER; note = 2'-O-methoxyethyl modified nucleotide with phosphorothioate linkage
  modified_base 14: mod_base = OTHER; note = 2'-O-N-methyl acetamide modified 5-methyl cytosine with phosphorothioate linkage
  modified_base 15: mod_base = OTHER; note = 2'-O-N-methyl acetamide modified thymine with phosphorothioate linkage
  modified_base 16: mod_base = OTHER; note = 2'-O-methoxyethyl modified nucleotide with phosphorothioate linkage
  modified_base 17: mod_base = OTHER; note = 2'-O-methoxyethyl modified nucleotide with phosphorothioate linkage
  modified_base 18: mod_base = OTHER; note = 2'-O-N-methyl acetamide modified 5-methyl cytosine
cactttcataatgctggc

SEQ ID NO: 212 - RNA, 19 nt, synthetic construct
  source 1..19: mol_type = other RNA
  modified_base 1: mod_base = OTHER; note = 2'-O-N-methyl acetamide modified thymine with phosphorothioate linkage
  modified_base 2: mod_base = OTHER; note = 2'-O-N-methyl acetamide modified 5-methyl cytosine with phosphorothioate linkage
  modified_base 3: mod_base = OTHER; note = 2'-O-N-methyl acetamide modified nucleotide with phosphorothioate linkage
  modified_base 4: mod_base = OTHER; note = 2'-O-N-methyl acetamide modified 5-methyl cytosine with phosphorothioate linkage
  modified_base 5: mod_base = OTHER; note = 2'-O-N-methyl acetamide modified thymine with phosphorothioate linkage
  modified_base 6: mod_base = OTHER; note = 2'-O-N-methyl acetamide modified thymine with phosphorothioate linkage
  modified_base 7: mod_base = OTHER; note = 2'-O-N-methyl acetamide modified thymine with phosphorothioate linkage
  modified_base 8: mod_base = OTHER; note = 2'-O-N-methyl acetamide modified 5-methyl cytosine with phosphorothioate linkage
  modified_base 9: mod_base = OTHER; note = 2'-O-N-methyl acetamide modified nucleotide with phosphorothioate linkage
  modified_base 10: mod_base = OTHER; note = 2'-O-N-methyl acetamide modified thymine with phosphorothioate linkage
  modified_base 11: mod_base = OTHER; note = 2'-O-N-methyl acetamide modified nucleotide with phosphorothioate linkage
  modified_base 12: mod_base = OTHER; note = 2'-O-N-methyl acetamide modified nucleotide with phosphorothioate linkage
  modified_base 13: mod_base = OTHER; note = 2'-O-N-methyl acetamide modified thymine with phosphorothioate linkage
  modified_base 14: mod_base = OTHER; note = 2'-O-N-methyl acetamide modified nucleotide with phosphorothioate linkage
  modified_base 15: mod_base = OTHER; note = 2'-O-N-methyl acetamide modified 5-methyl cytosine with phosphorothioate linkage
  modified_base 16: mod_base = OTHER; note = 2'-O-N-methyl acetamide modified thymine with phosphorothioate linkage
  modified_base 17: mod_base = OTHER; note = 2'-O-N-methyl acetamide modified nucleotide with phosphorothioate linkage
  modified_base 18: mod_base = OTHER; note = 2'-O-N-methyl acetamide modified nucleotide with phosphorothioate linkage
  modified_base 19: mod_base = OTHER; note = 2'-O-methoxyethyl modified 5-methyl cytosine
tcactttcataatgctggc

SEQ ID NO: 213 - RNA, 19 nt, synthetic construct
  source 1..19: mol_type = other RNA
  modified_base 1: mod_base = OTHER; note = 2'-O-N-methyl acetamide modified thymine with phosphorothioate linkage
  modified_base 2: mod_base = OTHER; note = 2'-O-N-methyl acetamide modified 5-methyl cytosine with phosphorothioate linkage
  modified_base 3: mod_base = OTHER; note = 2'-O-N-methyl acetamide modified nucleotide with phosphorothioate linkage
  modified_base 4: mod_base = OTHER; note = 2'-O-N-methyl acetamide modified 5-methyl cytosine with phosphorothioate linkage
  modified_base 5: mod_base = OTHER; note = 2'-O-N-methyl acetamide modified thymine with phosphorothioate linkage
  modified_base 6: mod_base = OTHER; note = 2'-O-N-methyl acetamide modified thymine with phosphorothioate linkage
  modified_base 7: mod_base = OTHER; note = 2'-O-N-methyl acetamide modified thymine with phosphorothioate linkage
  modified_base 8: mod_base = OTHER; note = 2'-O-N-methyl acetamide modified 5-methyl cytosine with phosphorothioate linkage
  modified_base 9: mod_base = OTHER; note = 2'-O-N-methyl acetamide modified nucleotide with phosphorothioate linkage
  modified_base 10: mod_base = OTHER; note = 2'-O-N-methyl acetamide modified thymine with phosphorothioate linkage
  modified_base 11: mod_base = OTHER; note = 2'-O-N-methyl acetamide modified nucleotide with phosphorothioate linkage
  modified_base 12: mod_base = OTHER; note = 2'-O-N-methyl acetamide modified nucleotide with phosphorothioate linkage
  modified_base 13: mod_base = OTHER; note = 2'-O-N-methyl acetamide modified thymine with phosphorothioate linkage
  modified_base 14: mod_base = OTHER; note = 2'-O-N-methyl acetamide modified nucleotide with phosphorothioate linkage
  modified_base 15: mod_base = OTHER; note = 2'-O-N-methyl acetamide modified 5-methyl cytosine with phosphorothioate linkage
  modified_base 16: mod_base = OTHER; note = 2'-O-N-methyl acetamide modified thymine with phosphorothioate linkage
  modified_base 17: mod_base = OTHER; note = 2'-O-N-methyl acetamide modified nucleotide with phosphorothioate linkage
  modified_base 18: mod_base = OTHER; note = 2'-O-N-methyl acetamide modified nucleotide with phosphorothioate linkage
  modified_base 19: mod_base = OTHER; note = 2'-O-methoxyethyl modified thymine
tcactttcataatgctggt

SEQ ID NO: 214 - RNA, 19 nt, synthetic construct
  source 1..19: mol_type = other RNA
  modified_base 1: mod_base = OTHER; note = 2'-O-N-methyl acetamide modified thymine with phosphorothioate linkage
  modified_base 2: mod_base = OTHER; note = 2'-O-N-methyl acetamide modified 5-methyl cytosine with phosphorothioate linkage
  modified_base 3: mod_base = OTHER; note = 2'-O-N-methyl acetamide modified nucleotide with phosphorothioate linkage
  modified_base 4: mod_base = OTHER; note = 2'-O-N-methyl acetamide modified 5-methyl cytosine with phosphorothioate linkage
  modified_base 5: mod_base = OTHER; note = 2'-O-N-methyl acetamide modified thymine with phosphorothioate linkage
  modified_base 6: mod_base = OTHER; note = 2'-O-N-methyl acetamide modified thymine with phosphorothioate linkage
  modified_base 7: mod_base = OTHER; note = 2'-O-N-methyl acetamide modified thymine with phosphorothioate linkage
  modified_base 8: mod_base = OTHER; note = 2'-O-N-methyl acetamide modified 5-methyl cytosine with phosphorothioate linkage
  modified_base 9: mod_base = OTHER; note = 2'-O-N-methyl acetamide modified nucleotide with phosphorothioate linkage
  modified_base 10: mod_base = OTHER; note = 2'-O-N-methyl acetamide modified thymine with phosphorothioate linkage
  modified_base 11: mod_base = OTHER; note = 2'-O-N-methyl acetamide modified nucleotide with phosphorothioate linkage
  modified_base 12: mod_base = OTHER; note = 2'-O-N-methyl acetamide modified nucleotide with phosphorothioate linkage
  modified_base 13: mod_base = OTHER; note = 2'-O-N-methyl acetamide modified thymine with phosphorothioate linkage
  modified_base 14: mod_base = OTHER; note = 2'-O-N-methyl acetamide modified nucleotide with phosphorothioate linkage
  modified_base 15: mod_base = OTHER; note = 2'-O-N-methyl acetamide modified 5-methyl cytosine with phosphorothioate linkage
  modified_base 16: mod_base = OTHER; note = 2'-O-N-methyl acetamide modified thymine with phosphorothioate linkage
  modified_base 17: mod_base = OTHER; note = 2'-O-N-methyl acetamide modified nucleotide with phosphorothioate linkage
  modified_base 18: mod_base = OTHER; note = 2'-O-N-methyl acetamide modified nucleotide with phosphorothioate linkage
  modified_base 19: mod_base = OTHER; note = 2'-O-methoxyethyl modified nucleotide
tcactttcataatgctgga

SEQ ID NO: 215 - RNA, 18 nt, synthetic construct
  source 1..18: mol_type = other RNA
  modified_base 1: mod_base = OTHER; note = Constrained ethyl modified 5-methyl cytosine with phosphorothioate linkage
  modified_base 2: mod_base = OTHER; note = 2'-O-methoxyethyl modified nucleotide with phosphorothioate linkage
  modified_base 3: mod_base = OTHER; note = 2'-O-methoxyethyl modified 5-methyl cytosine with phosphorothioate linkage
  modified_base 4: mod_base = OTHER; note = Constrained ethyl modified thymine with phosphorothioate linkage
  modified_base 5: mod_base = OTHER; note = 2'-O-methoxyethyl modified thymine with phosphorothioate linkage
  modified_base 6: mod_base = OTHER; note = 2'-O-methoxyethyl modified thymine with phosphorothioate linkage
  modified_base 7: mod_base = OTHER; note = Constrained ethyl modified 5-methyl cytosine with phosphorothioate linkage
  modified_base 8: mod_base = OTHER; note = 2'-O-methoxyethyl modified nucleotide with phosphorothioate linkage
  modified_base 9: mod_base = OTHER; note = 2'-O-methoxyethyl modified thymine with phosphorothioate linkage
  modified_base 10: mod_base = OTHER; note = Constrained ethyl modified nucleotide with phosphorothioate linkage
  modified_base 11: mod_base = OTHER; note = 2'-O-methoxyethyl modified nucleotide with phosphorothioate linkage
  modified_base 12: mod_base = OTHER; note = 2'-O-methoxyethyl modified thymine with phosphorothioate linkage
  modified_base 13: mod_base = OTHER; note = Constrained ethyl modified nucleotide with phosphorothioate linkage
  modified_base 14: mod_base = OTHER; note = 2'-O-methoxyethyl modified 5-methyl cytosine with phosphorothioate linkage
  modified_base 15: mod_base = OTHER; note = 2'-O-methoxyethyl modified thymine with phosphorothioate linkage
  modified_base 16: mod_base = OTHER; note = 2'-O-methoxyethyl modified nucleotide with phosphorothioate linkage
  modified_base 17: mod_base = OTHER; note = 2'-O-methoxyethyl modified nucleotide with phosphorothioate linkage
  modified_base 18: mod_base = OTHER; note = Constrained ethyl modified 5-methyl cytosine
cactttcataatgctggc

SEQ ID NO: 216 - RNA, 18 nt, synthetic construct
  source 1..18: mol_type = other RNA
  modified_base 1: mod_base = OTHER; note = Constrained ethyl modified 5-methyl cytosine with phosphorothioate linkage
  modified_base 2: mod_base = OTHER; note = 2'-O-methoxyethyl modified nucleotide with phosphorothioate linkage
  modified_base 3: mod_base = OTHER; note = 2'-O-methoxyethyl modified 5-methyl cytosine with phosphorothioate linkage
  modified_base 4: mod_base = OTHER; note = 2'-O-methoxyethyl modified thymine with phosphorothioate linkage
  modified_base 5: mod_base = OTHER; note = Constrained ethyl modified thymine with phosphorothioate linkage
  modified_base 6: mod_base = OTHER; note = 2'-O-methoxyethyl modified thymine with phosphorothioate linkage
  modified_base 7: mod_base = OTHER; note = 2'-O-methoxyethyl modified 5-methyl cytosine with phosphorothioate linkage
  modified_base 8: mod_base = OTHER; note = 2'-O-methoxyethyl modified nucleotide with phosphorothioate linkage
  modified_base 9: mod_base = OTHER; note = Constrained ethyl modified thymine with phosphorothioate linkage
  modified_base 10: mod_base = OTHER; note = 2'-O-methoxyethyl modified nucleotide with phosphorothioate linkage
  modified_base 11: mod_base = OTHER; note = 2'-O-methoxyethyl modified nucleotide with phosphorothioate linkage
  modified_base 12: mod_base = OTHER; note = 2'-O-methoxyethyl modified thymine with phosphorothioate linkage
  modified_base 13: mod_base = OTHER; note = Constrained ethyl modified nucleotide with phosphorothioate linkage
  modified_base 14: mod_base = OTHER; note = 2'-O-methoxyethyl modified 5-methyl cytosine with phosphorothioate linkage
  modified_base 15: mod_base = OTHER; note = 2'-O-methoxyethyl modified thymine with phosphorothioate linkage
  modified_base 16: mod_base = OTHER; note = 2'-O-methoxyethyl modified nucleotide with phosphorothioate linkage
  modified_base 17: mod_base = OTHER; note = 2'-O-methoxyethyl modified nucleotide with phosphorothioate linkage
  modified_base 18: mod_base = OTHER; note = Constrained ethyl modified 5-methyl cytosine
cactttcataatgctggc

SEQ ID NO: 217 - RNA, 18 nt, synthetic construct
  source 1..18: mol_type = other RNA
  modified_base 1: mod_base = OTHER; note = Constrained ethyl modified 5-methyl cytosine with phosphorothioate linkage
  modified_base 2: mod_base = OTHER; note = 2'-O-methoxyethyl modified nucleotide with phosphorothioate linkage
  modified_base 3: mod_base = OTHER; note = 2'-O-methoxyethyl modified 5-methyl cytosine with phosphorothioate linkage
  modified_base 4: mod_base = OTHER; note = 2'-O-methoxyethyl modified thymine with phosphorothioate linkage
  modified_base 5: mod_base = OTHER; note = 2'-O-methoxyethyl modified thymine with phosphorothioate linkage
  modified_base 6: mod_base = OTHER; note = 2'-O-methoxyethyl modified thymine with phosphorothioate linkage
  modified_base 7: mod_base = OTHER; note = Constrained ethyl modified 5-methyl cytosine with phosphorothioate linkage
  modified_base 8: mod_base = OTHER; note = 2'-O-methoxyethyl modified nucleotide with phosphorothioate linkage
  modified_base 9: mod_base = OTHER; note = 2'-O-methoxyethyl modified thymine with phosphorothioate linkage
  modified_base 10: mod_base = OTHER; note = 2'-O-methoxyethyl modified nucleotide with phosphorothioate linkage
  modified_base 11: mod_base = OTHER; note = 2'-O-methoxyethyl modified nucleotide with phosphorothioate linkage
  modified_base 12: mod_base = OTHER; note = 2'-O-methoxyethyl modified thymine with phosphorothioate linkage
  modified_base 13: mod_base = OTHER; note = Constrained ethyl modified nucleotide with phosphorothioate linkage
  modified_base 14: mod_base = OTHER; note = 2'-O-methoxyethyl modified 5-methyl cytosine with phosphorothioate linkage
  modified_base 15: mod_base = OTHER; note = 2'-O-methoxyethyl modified thymine with phosphorothioate linkage
  modified_base 16: mod_base = OTHER; note = 2'-O-methoxyethyl modified nucleotide with phosphorothioate linkage
  modified_base 17: mod_base = OTHER; note = 2'-O-methoxyethyl modified nucleotide with phosphorothioate linkage
  modified_base 18: mod_base = OTHER; note = Constrained ethyl modified 5-methyl cytosine
cactttcataatgctggc

SEQ ID NO: 218 - RNA, 18 nt, synthetic construct
  source 1..18: mol_type = other RNA
  modified_base 1: mod_base = OTHER; note = Constrained ethyl modified 5-methyl cytosine with phosphorothioate linkage
  modified_base 2: mod_base = OTHER; note = 2'-O-methoxyethyl modified nucleotide with phosphorothioate linkage
  modified_base 3: mod_base = OTHER; note = 2'-O-methoxyethyl modified 5-methyl cytosine with phosphorothioate linkage
  modified_base 4: mod_base = OTHER; note = 2'-O-methoxyethyl modified thymine with phosphorothioate linkage
  modified_base 5: mod_base = OTHER; note = 2'-O-methoxyethyl modified thymine with phosphorothioate linkage
  modified_base 6: mod_base = OTHER; note = 2'-O-methoxyethyl modified thymine with phosphorothioate linkage
  modified_base 7: mod_base = OTHER; note = 2'-O-methoxyethyl modified 5-methyl cytosine with phosphorothioate linkage
  modified_base 8: mod_base = OTHER; note = 2'-O-methoxyethyl modified nucleotide with phosphorothioate linkage
  modified_base 9: mod_base = OTHER; note = Constrained ethyl modified thymine with phosphorothioate linkage
  modified_base 10: mod_base = OTHER; note = 2'-O-methoxyethyl modified nucleotide with phosphorothioate linkage
  modified_base 11: mod_base = OTHER; note = 2'-O-methoxyethyl modified nucleotide with phosphorothioate linkage
  modified_base 12: mod_base = OTHER; note = 2'-O-methoxyethyl modified thymine with phosphorothioate linkage
  modified_base 13: mod_base = OTHER; note = 2'-O-methoxyethyl modified nucleotide with phosphorothioate linkage
  modified_base 14: mod_base = OTHER; note = 2'-O-methoxyethyl modified 5-methyl cytosine with phosphorothioate linkage
  modified_base 15: mod_base = OTHER; note = 2'-O-methoxyethyl modified thymine with phosphorothioate linkage
  modified_base 16: mod_base = OTHER; note = 2'-O-methoxyethyl modified nucleotide with phosphorothioate linkage
  modified_base 17: mod_base = OTHER; note = 2'-O-methoxyethyl modified nucleotide with phosphorothioate linkage
  modified_base 18: mod_base = OTHER; note = Constrained ethyl modified 5-methyl cytosine
cactttcataatgctggc

SEQ ID NO: 219 - RNA, 18 nt, synthetic construct
  source 1..18: mol_type = other RNA
  modified_base 1: mod_base = OTHER; note = Constrained ethyl modified 5-methyl cytosine with phosphorothioate linkage
  modified_base 2: mod_base = OTHER; note = 2'-O-methoxyethyl modified nucleotide with phosphorothioate linkage
  modified_base 3: mod_base = OTHER; note = 2'-O-methoxyethyl modified 5-methyl cytosine with phosphorothioate linkage
  modified_base 4: mod_base = OTHER; note = 2'-O-methoxyethyl modified thymine with phosphorothioate linkage
  modified_base 5: mod_base = OTHER; note = 2'-O-methoxyethyl modified thymine with phosphorothioate linkage
  modified_base 6: mod_base = OTHER; note = 2'-O-methoxyethyl modified thymine with phosphorothioate linkage
  modified_base 7: mod_base = OTHER; note = 2'-O-methoxyethyl modified 5-methyl cytosine with phosphorothioate linkage
  modified_base 8: mod_base = OTHER; note = 2'-O-methoxyethyl modified nucleotide with phosphorothioate linkage
  modified_base 9: mod_base = OTHER; note = 2'-O-methoxyethyl modified thymine with phosphorothioate linkage
  modified_base 10: mod_base = OTHER; note = 2'-O-methoxyethyl modified nucleotide with phosphorothioate linkage
  modified_base 11: mod_base = OTHER; note = 2'-O-methoxyethyl modified nucleotide with phosphorothioate linkage
  modified_base 12: mod_base = OTHER; note = 2'-O-methoxyethyl modified thymine with phosphorothioate linkage
  modified_base 13: mod_base = OTHER; note = 2'-O-methoxyethyl modified nucleotide with phosphorothioate linkage
  modified_base 14: mod_base = OTHER; note = 2'-O-methoxyethyl modified 5-methyl cytosine with phosphorothioate linkage
  modified_base 15: mod_base = OTHER; note = 2'-O-methoxyethyl modified thymine with phosphorothioate linkage
  modified_base 16: mod_base = OTHER; note = 2'-O-methoxyethyl modified nucleotide with phosphorothioate linkage
  modified_base 17: mod_base = OTHER; note = 2'-O-methoxyethyl modified nucleotide with phosphorothioate linkage
  modified_base 18: mod_base = OTHER; note = Constrained ethyl modified 5-methyl cytosine
cactttcataatgctggc

SEQ ID NO: 220 - RNA, 18 nt, synthetic construct
  source 1..18: mol_type = other RNA
  modified_base 1: mod_base = OTHER; note = 2'-O-methoxyethyl modified 5-methyl cytosine with phosphorothioate linkage
  modified_base 2: mod_base = OTHER; note = 2'-O-methoxyethyl modified nucleotide with phosphorothioate linkage
  modified_base 3: mod_base = OTHER; note = 2'-O-methoxyethyl modified 5-methyl cytosine with phosphorothioate linkage
  modified_base 4: mod_base = OTHER; note = Constrained ethyl modified thymine with phosphorothioate linkage
  modified_base 5: mod_base = OTHER; note = 2'-O-methoxyethyl modified thymine with phosphorothioate linkage
  modified_base 6: mod_base = OTHER; note = 2'-O-methoxyethyl modified thymine with phosphorothioate linkage
  modified_base 7: mod_base = OTHER; note = Constrained ethyl modified 5-methyl cytosine with phosphorothioate linkage
  modified_base 8: mod_base = OTHER; note = 2'-O-methoxyethyl modified nucleotide with phosphorothioate linkage
  modified_base 9: mod_base = OTHER; note = 2'-O-methoxyethyl modified thymine with phosphorothioate linkage
  modified_base 10: mod_base = OTHER; note = Constrained ethyl modified nucleotide with phosphorothioate linkage
  modified_base 11: mod_base = OTHER; note = 2'-O-methoxyethyl modified nucleotide with phosphorothioate linkage
  modified_base 12: mod_base = OTHER; note = 2'-O-methoxyethyl modified thymine with phosphorothioate linkage
  modified_base 13: mod_base = OTHER; note = Constrained ethyl modified nucleotide with phosphorothioate linkage
  modified_base 14: mod_base = OTHER; note = 2'-O-methoxyethyl modified 5-methyl cytosine with phosphorothioate linkage
  modified_base 15: mod_base = OTHER; note = 2'-O-methoxyethyl modified thymine with phosphorothioate linkage
  modified_base 16: mod_base = OTHER; note = Constrained ethyl modified nucleotide with phosphorothioate linkage
  modified_base 17: mod_base = OTHER; note = 2'-O-methoxyethyl modified nucleotide with phosphorothioate linkage
  modified_base 18: mod_base = OTHER; note = Constrained ethyl modified 5-methyl cytosine
cactttcataatgctggc

SEQ ID NO: 221 - RNA, 18 nt, synthetic construct
  source 1..18: mol_type = other RNA
  modified_base 1: mod_base = OTHER; note = 2'-O-methoxyethyl modified 5-methyl cytosine with phosphorothioate linkage
  modified_base 2: mod_base = OTHER; note = 2'-O-methoxyethyl modified nucleotide with phosphorothioate linkage
  modified_base 3: mod_base = OTHER; note = 2'-O-methoxyethyl modified 5-methyl cytosine with phosphorothioate linkage
  modified_base 4: mod_base = OTHER; note = Constrained ethyl modified thymine with phosphorothioate linkage
  modified_base 5: mod_base = OTHER; note = 2'-O-methoxyethyl modified thymine with phosphorothioate linkage
  modified_base 6: mod_base = OTHER; note = 2'-O-methoxyethyl modified thymine with phosphorothioate linkage
  modified_base 7: mod_base = OTHER; note = Constrained ethyl modified 5-methyl cytosine with phosphorothioate linkage
  modified_base 8: mod_base = OTHER; note = 2'-O-methoxyethyl modified nucleotide with phosphorothioate linkage
  modified_base 9: mod_base = OTHER; note = 2'-O-methoxyethyl modified thymine with phosphorothioate linkage
  modified_base 10: mod_base = OTHER; note = Constrained ethyl modified nucleotide with phosphorothioate linkage
  modified_base 11: mod_base = OTHER; note = 2'-O-methoxyethyl modified nucleotide with phosphorothioate linkage
  modified_base 12: mod_base = OTHER; note = 2'-O-methoxyethyl modified thymine with phosphorothioate linkage
  modified_base 13: mod_base = OTHER; note = Constrained ethyl modified nucleotide with phosphorothioate linkage
  modified_base 14: mod_base = OTHER; note = 2'-O-methoxyethyl modified 5-methyl cytosine with phosphorothioate linkage
  modified_base 15: mod_base = OTHER; note = 2'-O-methoxyethyl modified thymine with phosphorothioate linkage
  modified_base 16: mod_base = OTHER; note = Constrained ethyl modified nucleotide with phosphorothioate linkage
  modified_base 17: mod_base = OTHER; note = 2'-O-methoxyethyl modified nucleotide with phosphorothioate linkage
  modified_base 18: mod_base = OTHER; note = 2'-O-methoxyethyl modified 5-methyl cytosine
cactttcataatgctggc

SEQ ID NO: 222 - RNA, 18 nt, synthetic construct
  source 1..18: mol_type = other RNA
  modified_base 1: mod_base = OTHER; note = 2'-O-methoxyethyl modified 5-methyl cytosine with phosphorothioate linkage
  modified_base 2: mod_base = OTHER; note = 2'-O-methoxyethyl modified nucleotide with phosphorothioate linkage
  modified_base 3: mod_base = OTHER; note = 2'-O-methoxyethyl modified 5-methyl cytosine with phosphorothioate linkage
  modified_base 4: mod_base = OTHER; note = 2'-O-methoxyethyl modified thymine with phosphorothioate linkage
  modified_base 5: mod_base = OTHER; note = 2'-O-methoxyethyl modified thymine with phosphorothioate linkage
  modified_base 6: mod_base = OTHER; note = 2'-O-methoxyethyl modified thymine with phosphorothioate linkage
  modified_base 7: mod_base = OTHER; note = Constrained ethyl modified 5-methyl cytosine with phosphorothioate linkage
  modified_base 8: mod_base = OTHER; note = 2'-O-methoxyethyl modified nucleotide with phosphorothioate linkage
  modified_base 9: mod_base = OTHER; note = 2'-O-methoxyethyl modified thymine with phosphorothioate linkage
  modified_base 10: mod_base = OTHER; note = Constrained ethyl modified nucleotide with phosphorothioate linkage
  modified_base 11: mod_base = OTHER; note = 2'-O-methoxyethyl modified nucleotide with phosphorothioate linkage
  modified_base 12: mod_base = OTHER; note = 2'-O-methoxyethyl modified thymine with phosphorothioate linkage
  modified_base 13: mod_base = OTHER; note = Constrained ethyl modified nucleotide with phosphorothioate linkage
  modified_base 14: mod_base = OTHER; note = 2'-O-methoxyethyl modified 5-methyl cytosine with phosphorothioate linkage
  modified_base 15: mod_base = OTHER; note = 2'-O-methoxyethyl modified thymine with phosphorothioate linkage
  modified_base 16: mod_base = OTHER; note = Constrained ethyl modified nucleotide with phosphorothioate linkage
  modified_base 17: mod_base = OTHER; note = 2'-O-methoxyethyl modified nucleotide with phosphorothioate linkage
  modified_base 18: mod_base = OTHER; note = 2'-O-methoxyethyl modified 5-methyl cytosine
cactttcataatgctggc

SEQ ID NO: 223 - RNA, 18 nt, synthetic construct
  source 1..18: mol_type = other RNA
  modified_base 1: mod_base = OTHER; note = 2'-O-methoxyethyl modified 5-methyl cytosine with phosphorothioate linkage
  modified_base 2: mod_base = OTHER; note = 2'-O-methoxyethyl modified nucleotide with phosphorothioate linkage
  modified_base 3: mod_base = OTHER; note = 2'-O-methoxyethyl modified 5-methyl cytosine with phosphorothioate linkage
  modified_base 4: mod_base = OTHER; note = 2'-O-methoxyethyl modified thymine with phosphorothioate linkage
  modified_base 5: mod_base = OTHER; note = 2'-O-methoxyethyl modified thymine with phosphorothioate linkage
  modified_base 6: mod_base = OTHER; note = 2'-O-methoxyethyl modified thymine with phosphorothioate linkage
  modified_base 7: mod_base = OTHER; note = Constrained ethyl modified 5-methyl cytosine with phosphorothioate linkage
  modified_base 8: mod_base = OTHER; note = 2'-O-methoxyethyl modified nucleotide with phosphorothioate linkage
  modified_base 9: mod_base = OTHER; note = 2'-O-methoxyethyl modified thymine with phosphorothioate linkage
  modified_base 10: mod_base = OTHER; note = Constrained ethyl modified nucleotide with phosphorothioate linkage
  modified_base 11: mod_base = OTHER; note = 2'-O-methoxyethyl modified nucleotide with phosphorothioate linkage
  modified_base 12: mod_base = OTHER; note = 2'-O-methoxyethyl modified thymine with phosphorothioate linkage
  modified_base 13: mod_base = OTHER; note = Constrained ethyl modified nucleotide with phosphorothioate linkage
  modified_base 14: mod_base = OTHER; note = 2'-O-methoxyethyl modified 5-methyl cytosine with phosphorothioate linkage
  modified_base 15: mod_base = OTHER; note = 2'-O-methoxyethyl modified thymine with phosphorothioate linkage
  modified_base 16: mod_base = OTHER; note = 2'-O-methoxyethyl modified nucleotide with phosphorothioate linkage
  modified_base 17: mod_base = OTHER; note = 2'-O-methoxyethyl modified nucleotide with phosphorothioate linkage
  modified_base 18: mod_base = OTHER; note = 2'-O-methoxyethyl modified 5-methyl cytosine
cactttcataatgctggc

SEQ ID NO: 224 - RNA, 18 nt, synthetic construct
  source 1..18: mol_type = other RNA
  modified_base 1: mod_base = OTHER; note = 2'-O-methoxyethyl modified 5-methyl cytosine with phosphorothioate linkage
  modified_base 2: mod_base = OTHER; note = 2'-O-methoxyethyl modified nucleotide with phosphorothioate linkage
  modified_base 3: mod_base = OTHER; note = 2'-O-methoxyethyl modified 5-methyl cytosine with phosphorothioate linkage
  modified_base 4: mod_base = OTHER; note = 2'-O-methoxyethyl modified thymine with phosphorothioate linkage
  modified_base 5: mod_base = OTHER; note = 2'-O-methoxyethyl modified thymine with phosphorothioate linkage
  modified_base 6: mod_base = OTHER; note = 2'-O-methoxyethyl modified thymine with phosphorothioate linkage
  modified_base 7: mod_base = OTHER; note = Constrained ethyl modified 5-methyl cytosine with phosphorothioate linkage
  modified_base 8: mod_base = OTHER; note = 2'-O-methoxyethyl modified nucleotide with phosphorothioate linkage
  modified_base 9: mod_base = OTHER; note = 2'-O-methoxyethyl modified thymine with phosphorothioate linkage
  modified_base 10: mod_base = OTHER; note = 2'-O-methoxyethyl modified nucleotide with phosphorothioate linkage
  modified_base 11: mod_base = OTHER; note = 2'-O-methoxyethyl modified nucleotide with phosphorothioate linkage
  modified_base 12: mod_base = OTHER; note = 2'-O-methoxyethyl modified thymine with phosphorothioate linkage
  modified_base 13: mod_base = OTHER; note = Constrained ethyl modified nucleotide with phosphorothioate linkage
  modified_base 14: mod_base = OTHER; note = 2'-O-methoxyethyl modified 5-methyl cytosine with phosphorothioate linkage
  modified_base 15: mod_base = OTHER; note = 2'-O-methoxyethyl modified thymine with phosphorothioate linkage
  modified_base 16: mod_base = OTHER; note = 2'-O-methoxyethyl modified nucleotide with phosphorothioate linkage
  modified_base 17: mod_base = OTHER; note = 2'-O-methoxyethyl modified nucleotide with phosphorothioate linkage
  modified_base 18: mod_base = OTHER; note = 2'-O-methoxyethyl modified 5-methyl cytosine
cactttcataatgctggc

SEQ ID NO: 225 - RNA, 18 nt, synthetic construct
  source 1..18: mol_type = other RNA
  modified_base 1: mod_base = OTHER; note = Constrained ethyl modified 5-methyl cytosine with phosphorothioate linkage
  modified_base 2: mod_base = OTHER; note = 2'-O-methoxyethyl modified nucleotide with phosphorothioate linkage
  modified_base 3: mod_base = OTHER; note = 2'-O-methoxyethyl modified 5-methyl cytosine with phosphorothioate linkage
  modified_base 4: mod_base = OTHER; note = Constrained ethyl modified thymine with phosphorothioate linkage
  modified_base 5: mod_base = OTHER; note = 2'-O-methoxyethyl modified thymine with phosphorothioate linkage
  modified_base 6: mod_base = OTHER; note = 2'-O-methoxyethyl modified thymine with phosphorothioate linkage
  modified_base 7: mod_base = OTHER; note = Constrained ethyl modified 5-methyl cytosine with phosphorothioate linkage
  modified_base 8: mod_base = OTHER; note = 2'-O-methoxyethyl modified nucleotide with phosphorothioate linkage
  modified_base 9: mod_base = OTHER; note = 2'-O-methoxyethyl modified thymine with phosphorothioate linkage
  modified_base 10: mod_base = OTHER; note = Constrained ethyl modified nucleotide with phosphorothioate linkage
  modified_base 11: mod_base = OTHER; note = 2'-O-methoxyethyl modified nucleotide with phosphorothioate linkage
  modified_base 12: mod_base = OTHER; note = 2'-O-methoxyethyl modified thymine with phosphorothioate linkage
  modified_base 13: mod_base = OTHER; note = 2'-O-methoxyethyl modified nucleotide with phosphorothioate linkage
  modified_base 14: mod_base = OTHER; note = 2'-O-methoxyethyl modified 5-methyl cytosine with phosphorothioate linkage
  modified_base 15: mod_base = OTHER; note = 2'-O-methoxyethyl modified thymine with phosphorothioate linkage
  modified_base 16: mod_base = OTHER; note = 2'-O-methoxyethyl modified nucleotide with phosphorothioate linkage
  modified_base 17: mod_base = OTHER; note = 2'-O-methoxyethyl modified nucleotide with phosphorothioate linkage
  modified_base 18: mod_base = OTHER; note = 2'-O-methoxyethyl modified 5-methyl cytosine
cactttcataatgctggc

SEQ ID NO: 226 - RNA, 18 nt, synthetic construct
  source 1..18: mol_type = other RNA
  modified_base 1: mod_base = OTHER; note = 2'-O-methoxyethyl modified 5-methyl cytosine with phosphorothioate linkage
  modified_base 2: mod_base = OTHER; note = 2'-O-methoxyethyl modified nucleotide with phosphorothioate linkage
  modified_base 3: mod_base = OTHER; note = 2'-O-methoxyethyl modified 5-methyl cytosine with phosphorothioate linkage
  modified_base 4: mod_base = OTHER; note = 2'-O-methoxyethyl modified thymine with phosphorothioate linkage
  modified_base 5: mod_base = OTHER; note = 2'-O-methoxyethyl modified thymine with phosphorothioate linkage
  modified_base 6: mod_base = OTHER; note = 2'-O-methoxyethyl modified thymine with phosphorothioate linkage
  modified_base 7: mod_base = OTHER; note = 2'-O-methoxyethyl modified 5-methyl cytosine with phosphorothioate linkage
  modified_base 8: mod_base = OTHER; note = 2'-O-methoxyethyl modified nucleotide with phosphorothioate linkage
  modified_base 9: mod_base = OTHER; note = Constrained ethyl modified thymine with phosphorothioate linkage
  modified_base 10: mod_base = OTHER; note = 2'-O-methoxyethyl modified nucleotide with phosphorothioate linkage
  modified_base 11: mod_base = OTHER; note = 2'-O-methoxyethyl modified nucleotide with phosphorothioate linkage
  modified_base 12: mod_base = OTHER; note = Constrained ethyl modified thymine with phosphorothioate linkage
  modified_base 13: mod_base = OTHER; note = 2'-O-methoxyethyl modified nucleotide with phosphorothioate linkage
  modified_base 14: mod_base = OTHER; note = 2'-O-methoxyethyl modified 5-methyl cytosine with phosphorothioate linkage
  modified_base 15: mod_base = OTHER; note = Constrained ethyl modified thymine with phosphorothioate linkage
  modified_base 16: mod_base = OTHER; note = 2'-O-methoxyethyl modified nucleotide with phosphorothioate linkage
  modified_base 17: mod_base = OTHER; note = 2'-O-methoxyethyl modified nucleotide with phosphorothioate linkage
  modified_base 18: mod_base = OTHER; note = Constrained ethyl modified 5-methyl cytosine
cactttcataatgctggc

SEQ ID NO: 227 - RNA, 18 nt, synthetic construct
  source 1..18: mol_type = other RNA
  modified_base 1: mod_base = OTHER; note = Constrained ethyl modified 5-methyl cytosine with phosphorothioate linkage
  modified_base 2: mod_base = OTHER; note = 2'-O-methoxyethyl modified nucleotide with phosphorothioate linkage
  modified_base 3: mod_base = OTHER; note = 2'-O-methoxyethyl modified 5-methyl cytosine with phosphorothioate linkage
  modified_base 4: mod_base = OTHER; note = Constrained ethyl modified thymine with phosphorothioate linkage
  modified_base 5: mod_base = OTHER; note = 2'-O-methoxyethyl modified thymine with phosphorothioate linkage
  modified_base 6: mod_base = OTHER; note = 2'-O-methoxyethyl modified thymine with phosphorothioate linkage
  modified_base 7: mod_base = OTHER; note = Constrained ethyl modified 5-methyl cytosine with phosphorothioate linkage
  modified_base 8: mod_base = OTHER; note = 2'-O-methoxyethyl modified nucleotide with phosphorothioate linkage
  modified_base 9: mod_base = OTHER; note = 2'-O-methoxyethyl modified thymine with phosphorothioate linkage
  modified_base 10: mod_base = OTHER; note = 2'-O-methoxyethyl modified nucleotide with phosphorothioate linkage
  modified_base 11: mod_base = OTHER; note = 2'-O-methoxyethyl modified nucleotide with phosphorothioate linkage
  modified_base 12: mod_base = OTHER; note = 2'-O-methoxyethyl modified thymine with phosphorothioate linkage
  modified_base 13: mod_base = OTHER; note = 2'-O-methoxyethyl modified nucleotide with phosphorothioate linkage
  modified_base 14: mod_base = OTHER; note = 2'-O-methoxyethyl modified 5-methyl cytosine with phosphorothioate linkage
  modified_base 15: mod_base = OTHER; note = 2'-O-methoxyethyl modified thymine with phosphorothioate linkage
  modified_base 16: mod_base = OTHER; note = 2'-O-methoxyethyl modified nucleotide with phosphorothioate linkage
  modified_base 17: mod_base = OTHER; note = 2'-O-methoxyethyl modified nucleotide with phosphorothioate linkage
  modified_base 18: mod_base = OTHER; note = 2'-O-methoxyethyl modified 5-methyl cytosine
cactttcataatgctggc

SEQ ID NO: 228 - RNA, 18 nt, synthetic construct
  source 1..18: mol_type = other RNA
  modified_base 1: mod_base = OTHER; note = 2'-O-methoxyethyl modified 5-methyl cytosine with phosphorothioate linkage
  modified_base 2: mod_base = OTHER; note = 2'-O-methoxyethyl modified nucleotide with phosphorothioate linkage
  modified_base 3: mod_base = OTHER; note = 2'-O-methoxyethyl modified 5-methyl cytosine with phosphorothioate linkage
  modified_base 4: mod_base = OTHER; note = 2'-O-methoxyethyl modified thymine with phosphorothioate linkage
  modified_base 5: mod_base = OTHER; note = 2'-O-methoxyethyl modified thymine with phosphorothioate linkage
  modified_base 6: mod_base = OTHER; note = 2'-O-methoxyethyl modified thymine with phosphorothioate linkage
  modified_base 7: mod_base = OTHER; note = 2'-O-methoxyethyl modified 5-methyl cytosine with phosphorothioate linkage
  modified_base 8: mod_base = OTHER; note = 2'-O-methoxyethyl modified nucleotide with phosphorothioate linkage
  modified_base 9: mod_base = OTHER; note = 2'-O-methoxyethyl modified thymine with phosphorothioate linkage
  modified_base 10: mod_base = OTHER; note = 2'-O-methoxyethyl modified nucleotide with phosphorothioate linkage
  modified_base 11: mod_base = OTHER; note = 2'-O-methoxyethyl modified nucleotide with phosphorothioate linkage
  modified_base 12: mod_base = OTHER; note = Constrained ethyl modified thymine with phosphorothioate linkage
  modified_base 13: mod_base = OTHER; note = 2'-O-methoxyethyl modified nucleotide with phosphorothioate linkage
  modified_base 14: mod_base = OTHER; note = 2'-O-methoxyethyl modified 5-methyl cytosine with phosphorothioate linkage
  modified_base 15: mod_base = OTHER; note = Constrained ethyl modified thymine with phosphorothioate linkage
  modified_base 16: mod_base = OTHER; note = 2'-O-methoxyethyl modified nucleotide with phosphorothioate linkage
  modified_base 17: mod_base = OTHER; note = 2'-O-methoxyethyl modified nucleotide with phosphorothioate linkage
  modified_base 18: mod_base = OTHER; note = Constrained ethyl modified 5-methyl cytosine
cactttcataatgctggc

SEQ ID NO: 229 - RNA, 18 nt, synthetic construct
  source 1..18: mol_type = other RNA
  modified_base 1: mod_base = OTHER; note = Constrained ethyl modified 5-methyl cytosine with phosphorothioate linkage
  modified_base 2: mod_base = OTHER; note = 2'-O-methoxyethyl modified nucleotide with phosphorothioate linkage
  modified_base 3: mod_base = OTHER; note = 2'-O-methoxyethyl modified 5-methyl cytosine with phosphorothioate linkage
  modified_base 4: mod_base = OTHER; note = Constrained ethyl modified thymine with phosphorothioate linkage
  modified_base 5: mod_base = OTHER; note = 2'-O-methoxyethyl modified thymine with phosphorothioate linkage
  modified_base 6: mod_base = OTHER; note = 2'-O-methoxyethyl modified thymine with phosphorothioate linkage
  modified_base 7: mod_base = OTHER; note = 2'-O-methoxyethyl modified 5-methyl cytosine with phosphorothioate linkage
  modified_base 8: mod_base = OTHER; note = 2'-O-methoxyethyl modified nucleotide with phosphorothioate linkage
  modified_base 9: mod_base = OTHER; note = 2'-O-methoxyethyl modified thymine with phosphorothioate linkage
  modified_base 10: mod_base = OTHER; note = 2'-O-methoxyethyl modified nucleotide with phosphorothioate linkage
  modified_base 11: mod_base = OTHER; note = 2'-O-methoxyethyl modified nucleotide with phosphorothioate linkage
  modified_base 12: mod_base = OTHER; note = 2'-O-methoxyethyl modified thymine with phosphorothioate linkage
  modified_base 13: mod_base = OTHER; note = 2'-O-methoxyethyl modified nucleotide with phosphorothioate linkage
  modified_base 14: mod_base = OTHER; note = 2'-O-methoxyethyl modified 5-methyl cytosine with phosphorothioate linkage
  modified_base 15: mod_base = OTHER; note = 2'-O-methoxyethyl modified thymine with phosphorothioate linkage
  modified_base 16: mod_base = OTHER; note = 2'-O-methoxyethyl modified nucleotide with phosphorothioate linkage
  modified_base 17: mod_base = OTHER; note = 2'-O-methoxyethyl modified nucleotide with phosphorothioate linkage
  modified_base 18: mod_base = OTHER; note = 2'-O-methoxyethyl modified 5-methyl cytosine
cactttcataatgctggc

SEQ ID NO: 230 - RNA, 18 nt, synthetic construct
  source 1..18: mol_type = other RNA
  modified_base 1: mod_base = OTHER; note = 2'-O-methoxyethyl modified 5-methyl cytosine with phosphorothioate linkage
  modified_base 2: mod_base = OTHER; note = 2'-O-methoxyethyl modified nucleotide with phosphorothioate linkage
  modified_base 3: mod_base = OTHER; note = 2'-O-methoxyethyl modified 5-methyl cytosine with phosphorothioate linkage
  modified_base 4: mod_base = OTHER; note = 2'-O-methoxyethyl modified thymine with phosphorothioate linkage
  modified_base 5: mod_base = OTHER; note = 2'-O-methoxyethyl modified thymine with phosphorothioate linkage
  modified_base 6: mod_base = OTHER; note = 2'-O-methoxyethyl modified thymine with phosphorothioate linkage
  modified_base 7: mod_base = OTHER; note = 2'-O-methoxyethyl modified 5-methyl cytosine with phosphorothioate linkage
  modified_base 8: mod_base = OTHER; note = 2'-O-methoxyethyl modified nucleotide with phosphorothioate linkage
  modified_base 9: mod_base = OTHER; note = 2'-O-methoxyethyl modified thymine with phosphorothioate linkage
  modified_base 10: mod_base = OTHER; note = 2'-O-methoxyethyl modified nucleotide with phosphorothioate linkage
  modified_base 11: mod_base = OTHER; note = 2'-O-methoxyethyl modified nucleotide with phosphorothioate linkage
  modified_base 12: mod_base = OTHER; note = 2'-O-methoxyethyl modified thymine with phosphorothioate linkage
  modified_base 13: mod_base = OTHER; note = 2'-O-methoxyethyl modified nucleotide with phosphorothioate linkage
  modified_base 14: mod_base = OTHER; note = 2'-O-methoxyethyl modified 5-methyl cytosine with phosphorothioate linkage
  modified_base 15: mod_base = OTHER; note = Constrained ethyl modified thymine with phosphorothioate linkage
  modified_base 16: mod_base = OTHER; note = 2'-O-methoxyethyl modified nucleotide with phosphorothioate linkage
  modified_base 17: mod_base = OTHER; note = 2'-O-methoxyethyl modified nucleotide with phosphorothioate linkage
  modified_base 18: mod_base = OTHER; note = Constrained ethyl modified 5-methyl cytosine
cactttcataatgctggc

SEQ ID NO: 231 - RNA, 17 nt, synthetic construct
  source 1..17: mol_type = other RNA
  modified_base 1: mod_base = OTHER; note = Constrained ethyl modified nucleotide with phosphorothioate linkage
  modified_base 2: mod_base = OTHER; note = 2'-O-methoxyethyl modified 5-methyl cytosine with phosphorothioate linkage
  modified_base 3: mod_base = OTHER; note = 2'-O-methoxyethyl modified thymine with phosphorothioate linkage
  modified_base 4: mod_base = OTHER; note = Constrained ethyl modified thymine with phosphorothioate linkage
  modified_base 5: mod_base = OTHER; note = 2'-O-methoxyethyl modified thymine with phosphorothioate linkage
  modified_base 6: mod_base = OTHER; note = 2'-O-methoxyethyl modified 5-methyl cytosine with phosphorothioate linkage
  modified_base 7: mod_base = OTHER; note = Constrained ethyl modified nucleotide with phosphorothioate linkage
  modified_base 8: mod_base = OTHER; note = 2'-O-methoxyethyl modified thymine with phosphorothioate linkage
  modified_base 9: mod_base = OTHER; note = 2'-O-methoxyethyl modified nucleotide with phosphorothioate linkage
  modified_base 10: mod_base = OTHER; note = Constrained ethyl modified nucleotide with phosphorothioate linkage
  modified_base 11: mod_base = OTHER; note = 2'-O-methoxyethyl modified thymine with phosphorothioate linkage
  modified_base 12: mod_base = OTHER; note = 2'-O-methoxyethyl modified nucleotide with phosphorothioate linkage
  modified_base 13: mod_base = OTHER; note = Constrained ethyl modified 5-methyl cytosine with phosphorothioate linkage
  modified_base 14: mod_base = OTHER; note = 2'-O-methoxyethyl modified thymine with phosphorothioate linkage
  modified_base 15: mod_base = OTHER; note = 2'-O-methoxyethyl modified nucleotide with phosphorothioate linkage
  modified_base 16: mod_base = OTHER; note = 2'-O-methoxyethyl modified nucleotide with phosphorothioate linkage
  modified_base 17: mod_base = OTHER; note = Constrained ethyl modified 5-methyl cytosine
actttcataatgctggc

SEQ ID NO: 232 - RNA, 17 nt, synthetic construct
  source 1..17: mol_type = other RNA
  modified_base 1: mod_base = OTHER; note = Constrained ethyl modified nucleotide with phosphorothioate linkage
  modified_base 2: mod_base = OTHER; note = 2'-O-methoxyethyl modified 5-methyl cytosine with phosphorothioate linkage
  modified_base 3: mod_base = OTHER; note = 2'-O-methoxyethyl modified thymine with phosphorothioate linkage
  modified_base 4: mod_base = OTHER; note = 2'-O-methoxyethyl modified thymine with phosphorothioate linkage
  modified_base 5: mod_base = OTHER; note = Constrained ethyl modified thymine with phosphorothioate linkage
  modified_base 6: mod_base = OTHER; note = 2'-O-methoxyethyl modified 5-methyl cytosine with phosphorothioate linkage
  modified_base 7: mod_base = OTHER; note = 2'-O-methoxyethyl modified nucleotide with phosphorothioate linkage
  modified_base 8: mod_base = OTHER; note = 2'-O-methoxyethyl modified thymine with phosphorothioate linkage
  modified_base 9: mod_base = OTHER; note = Constrained ethyl modified nucleotide with phosphorothioate linkage
  modified_base 10: mod_base = OTHER; note = 2'-O-methoxyethyl modified nucleotide with phosphorothioate linkage
  modified_base 11: mod_base = OTHER; note = 2'-O-methoxyethyl modified thymine with phosphorothioate linkage
  modified_base 12: mod_base = OTHER; note = 2'-O-methoxyethyl modified nucleotide with phosphorothioate linkage
  modified_base 13: mod_base = OTHER; note = Constrained ethyl modified 5-methyl cytosine with phosphorothioate linkage
  modified_base 14: mod_base = OTHER; note = 2'-O-methoxyethyl modified thymine with phosphorothioate linkage
  modified_base 15: mod_base = OTHER; note = 2'-O-methoxyethyl modified nucleotide with phosphorothioate linkage
  modified_base 16: mod_base = OTHER; note = 2'-O-methoxyethyl modified nucleotide with phosphorothioate linkage
  modified_base 17: mod_base = OTHER; note = Constrained ethyl modified 5-methyl cytosine
actttcataatgctggc

SEQ ID NO: 233 - RNA, 17 nt, synthetic construct
  source 1..17: mol_type = other RNA
  modified_base 1: mod_base = OTHER; note = Constrained ethyl modified nucleotide with phosphorothioate linkage
  modified_base 2: mod_base = OTHER; note = 2'-O-methoxyethyl modified 5-methyl cytosine with phosphorothioate linkage
  modified_base 3: mod_base = OTHER; note = 2'-O-methoxyethyl modified thymine with phosphorothioate linkage
  modified_base 4: mod_base = OTHER; note = 2'-O-methoxyethyl modified thymine with phosphorothioate linkage
  modified_base 5: mod_base = OTHER; note = 2'-O-methoxyethyl modified thymine with phosphorothioate linkage
  modified_base 6: mod_base = OTHER; note = Constrained ethyl modified 5-methyl cytosine with phosphorothioate linkage
  modified_base 7: mod_base = OTHER; note = 2'-O-methoxyethyl modified nucleotide with phosphorothioate linkage
  modified_base 8: mod_base = OTHER; note = 2'-O-methoxyethyl modified thymine with phosphorothioate linkage
  modified_base 9: mod_base = OTHER; note = 2'-O-methoxyethyl modified nucleotide with phosphorothioate linkage
  modified_base 10: mod_base = OTHER; note = 2'-O-methoxyethyl modified nucleotide with phosphorothioate linkage
  modified_base 11: mod_base = OTHER; note = 2'-O-methoxyethyl modified thymine with phosphorothioate linkage
  modified_base 12: mod_base = OTHER; note = Constrained ethyl modified nucleotide with phosphorothioate linkage
  modified_base 13: mod_base = OTHER; note = 2'-O-methoxyethyl modified 5-methyl cytosine with phosphorothioate linkage
  modified_base 14: mod_base = OTHER; note = 2'-O-methoxyethyl modified thymine with phosphorothioate linkage
  modified_base 15: mod_base = OTHER; note = 2'-O-methoxyethyl modified nucleotide with phosphorothioate linkage
  modified_base 16: mod_base = OTHER; note = 2'-O-methoxyethyl modified nucleotide with phosphorothioate linkage
  modified_base 17: mod_base = OTHER; note = Constrained ethyl modified 5-methyl cytosine
actttcataatgctggc

SEQ ID NO: 234 - RNA, 17 nt, synthetic construct
  source 1..17: mol_type = other RNA
  modified_base 1: mod_base = OTHER; note = Constrained ethyl modified nucleotide with phosphorothioate linkage
  modified_base 2: mod_base = OTHER; note = 2'-O-methoxyethyl modified 5-methyl cytosine with phosphorothioate linkage
  modified_base 3: mod_base = OTHER; note = 2'-O-methoxyethyl modified thymine with phosphorothioate linkage
  modified_base 4: mod_base = OTHER; note = 2'-O-methoxyethyl modified thymine with phosphorothioate linkage
  modified_base 5: mod_base = OTHER; note = 2'-O-methoxyethyl modified thymine with phosphorothioate linkage
  modified_base 6: mod_base = OTHER; note = 2'-O-methoxyethyl modified 5-methyl cytosine with phosphorothioate linkage
  modified_base 7: mod_base = OTHER; note = 2'-O-methoxyethyl modified nucleotide with phosphorothioate linkage
  modified_base 8: mod_base = OTHER; note = 2'-O-methoxyethyl modified thymine with phosphorothioate linkage
  modified_base 9: mod_base = OTHER; note = Constrained ethyl modified nucleotide with phosphorothioate linkage
  modified_base 10: mod_base = OTHER; note = 2'-O-methoxyethyl modified nucleotide with phosphorothioate linkage
  modified_base 11: mod_base = OTHER; note = 2'-O-methoxyethyl modified thymine with phosphorothioate linkage
  modified_base 12: mod_base = OTHER; note = 2'-O-methoxyethyl modified nucleotide with phosphorothioate linkage
  modified_base 13: mod_base = OTHER; note = 2'-O-methoxyethyl modified 5-methyl cytosine with phosphorothioate linkage
  modified_base 14: mod_base = OTHER; note = 2'-O-methoxyethyl modified thymine with phosphorothioate linkage
  modified_base 15: mod_base = OTHER; note = 2'-O-methoxyethyl modified nucleotide with phosphorothioate linkage
  modified_base 16: mod_base = OTHER; note = 2'-O-methoxyethyl modified nucleotide with phosphorothioate linkage
  modified_base 17: mod_base = OTHER; note = Constrained ethyl modified 5-methyl cytosine
actttcataatgctggc

SEQ ID NO: 235 - RNA, 17 nt, synthetic construct
  source 1..17: mol_type = other RNA
  modified_base 1: mod_base = OTHER; note = Constrained ethyl modified nucleotide with phosphorothioate linkage
  modified_base 2: mod_base = OTHER; note = 2'-O-methoxyethyl modified 5-methyl cytosine with phosphorothioate linkage
  modified_base 3: mod_base = OTHER; note = 2'-O-methoxyethyl modified thymine with phosphorothioate linkage
  modified_base 4: mod_base = OTHER; note = 2'-O-methoxyethyl modified thymine with phosphorothioate linkage
  modified_base 5: mod_base = OTHER; note = 2'-O-methoxyethyl modified thymine with phosphorothioate linkage
  modified_base 6: mod_base = OTHER; note = 2'-O-methoxyethyl modified 5-methyl cytosine with phosphorothioate linkage
  modified_base 7: mod_base = OTHER; note = 2'-O-methoxyethyl modified nucleotide with phosphorothioate linkage
  modified_base 8: mod_base = OTHER; note = 2'-O-methoxyethyl modified thymine with phosphorothioate linkage
  modified_base 9: mod_base = OTHER; note = 2'-O-methoxyethyl modified nucleotide with phosphorothioate linkage
  modified_base 10: mod_base = OTHER; note = 2'-O-methoxyethyl modified nucleotide with phosphorothioate linkage
  modified_base 11: mod_base = OTHER; note = 2'-O-methoxyethyl modified thymine with phosphorothioate linkage
  modified_base 12: mod_base = OTHER; note = 2'-O-methoxyethyl modified nucleotide with phosphorothioate linkage
  modified_base 13: mod_base = OTHER; note = 2'-O-methoxyethyl modified 5-methyl cytosine with phosphorothioate linkage
  modified_base 14: mod_base = OTHER; note = 2'-O-methoxyethyl modified thymine with phosphorothioate linkage
  modified_base 15: mod_base = OTHER; note = 2'-O-methoxyethyl modified nucleotide with phosphorothioate linkage
  modified_base 16: mod_base = OTHER; note = 2'-O-methoxyethyl modified nucleotide with phosphorothioate linkage
  modified_base 17: mod_base = OTHER; note = Constrained ethyl modified 5-methyl cytosine
actttcataatgctggc

SEQ ID NO: 236 - RNA, 17 nt, synthetic construct
  source 1..17: mol_type = other RNA
  modified_base 1: mod_base = OTHER; note = 2'-O-methoxyethyl modified nucleotide with phosphorothioate linkage
  modified_base 2: mod_base = OTHER; note = 2'-O-methoxyethyl modified 5-methyl cytosine with phosphorothioate linkage
  modified_base 3: mod_base = OTHER; note = Constrained ethyl modified thymine with phosphorothioate linkage
  modified_base 4: mod_base = OTHER; note = 2'-O-methoxyethyl modified thymine with phosphorothioate linkage
  modified_base 5: mod_base = OTHER; note = 2'-O-methoxyethyl modified thymine with phosphorothioate linkage
  modified_base 6: mod_base = OTHER; note = Constrained ethyl modified 5-methyl cytosine with phosphorothioate linkage
  modified_base 7: mod_base = OTHER; note = 2'-O-methoxyethyl modified nucleotide with phosphorothioate linkage
  modified_base 8: mod_base = OTHER; note = 2'-O-methoxyethyl modified thymine with phosphorothioate linkage
  modified_base 9: mod_base = OTHER; note = Constrained ethyl modified nucleotide with phosphorothioate linkage
  modified_base 10: mod_base = OTHER; note = 2'-O-methoxyethyl modified nucleotide with phosphorothioate linkage
  modified_base 11: mod_base = OTHER; note = 2'-O-methoxyethyl modified thymine with phosphorothioate linkage
  modified_base 12: mod_base = OTHER; note = Constrained ethyl modified nucleotide with phosphorothioate linkage
  modified_base 13: mod_base = OTHER; note = 2'-O-methoxyethyl modified 5-methyl cytosine with phosphorothioate linkage
  modified_base 14: mod_base = OTHER; note = 2'-O-methoxyethyl modified thymine with phosphorothioate linkage
  modified_base 15: mod_base = OTHER; note = Constrained ethyl modified nucleotide with phosphorothioate linkage
  modified_base 16: mod_base = OTHER; note = 2'-O-methoxyethyl modified nucleotide with phosphorothioate linkage
  modified_base 17: mod_base = OTHER; note = Constrained ethyl modified 5-methyl cytosine
actttcataatgctggc

SEQ ID NO: 237 - RNA, 17 nt, synthetic construct
  source 1..17: mol_type = other RNA
  modified_base 1: mod_base = OTHER; note = 2'-O-methoxyethyl modified nucleotide with phosphorothioate linkage
  modified_base 2: mod_base = OTHER; note = 2'-O-methoxyethyl modified 5-methyl cytosine with phosphorothioate linkage
  modified_base 3: mod_base = OTHER; note = Constrained ethyl modified thymine with phosphorothioate linkage
  modified_base 4: mod_base = OTHER; note = 2'-O-methoxyethyl modified thymine with phosphorothioate linkage
  modified_base 5: mod_base = OTHER; note = 2'-O-methoxyethyl modified thymine with phosphorothioate linkage
  modified_base 6: mod_base = OTHER; note = Constrained ethyl modified 5-methyl cytosine with phosphorothioate linkage
  modified_base 7: mod_base = OTHER; note = 2'-O-methoxyethyl modified nucleotide with phosphorothioate linkage
  modified_base 8: mod_base = OTHER; note = 2'-O-methoxyethyl modified thymine with phosphorothioate linkage
  modified_base 9: mod_base = OTHER; note = Constrained ethyl modified nucleotide with phosphorothioate linkage
  modified_base 10: mod_base = OTHER; note = 2'-O-methoxyethyl modified nucleotide with phosphorothioate linkage
  modified_base 11: mod_base = OTHER; note = 2'-O-methoxyethyl modified thymine with phosphorothioate linkage
  modified_base 12: mod_base = OTHER; note = Constrained ethyl modified nucleotide with phosphorothioate linkage
  modified_base 13: mod_base = OTHER; note = 2'-O-methoxyethyl modified 5-methyl cytosine with phosphorothioate linkage
  modified_base 14: mod_base = OTHER; note = 2'-O-methoxyethyl modified thymine with phosphorothioate linkage
  modified_base 15: mod_base = OTHER; note = Constrained ethyl modified nucleotide with phosphorothioate linkage
  modified_base 16: mod_base = OTHER; note = 2'-O-methoxyethyl modified nucleotide with phosphorothioate linkage
  modified_base 17: mod_base = OTHER; note = 2'-O-methoxyethyl modified 5-methyl cytosine
actttcataatgctggc

SEQ ID NO: 238 - RNA, 17 nt, synthetic construct
  source 1..17: mol_type = other RNA
  modified_base 1: mod_base = OTHER; note = 2'-O-methoxyethyl modified nucleotide with phosphorothioate linkage
  modified_base 2: mod_base = OTHER; note = 2'-O-methoxyethyl modified 5-methyl cytosine with phosphorothioate linkage
  modified_base 3: mod_base = OTHER; note = 2'-O-methoxyethyl modified thymine with phosphorothioate linkage
  modified_base 4: mod_base = OTHER; note = 2'-O-methoxyethyl modified thymine with phosphorothioate linkage
  modified_base 5: mod_base = OTHER; note = 2'-O-methoxyethyl modified thymine with phosphorothioate linkage
  modified_base 6: mod_base = OTHER; note = Constrained ethyl modified 5-methyl cytosine with phosphorothioate linkage
  modified_base 7: mod_base = OTHER; note = 2'-O-methoxyethyl modified nucleotide with phosphorothioate linkage
  modified_base 8: mod_base = OTHER; note = 2'-O-methoxyethyl modified thymine with phosphorothioate linkage
  modified_base 9: mod_base = OTHER; note = Constrained ethyl modified nucleotide with phosphorothioate linkage
  modified_base 10: mod_base = OTHER; note = 2'-O-methoxyethyl modified nucleotide with phosphorothioate linkage
  modified_base 11: mod_base = OTHER; note = 2'-O-methoxyethyl modified thymine with phosphorothioate linkage
  modified_base 12: mod_base = OTHER; note = Constrained ethyl modified nucleotide with phosphorothioate linkage
  modified_base 13: mod_base = OTHER; note = 2'-O-methoxyethyl modified 5-methyl cytosine with phosphorothioate linkage
  modified_base 14: mod_base = OTHER; note = 2'-O-methoxyethyl modified thymine with phosphorothioate linkage
  modified_base 15: mod_base = OTHER; note = Constrained ethyl modified nucleotide with phosphorothioate linkage
  modified_base 16: mod_base = OTHER; note = 2'-O-methoxyethyl modified nucleotide with phosphorothioate linkage
  modified_base 17: mod_base = OTHER; note = 2'-O-methoxyethyl modified 5-methyl cytosine
actttcataatgctggc

SEQ ID NO: 239 - RNA, 17 nt, synthetic construct
  source 1..17: mol_type = other RNA
  modified_base 1: mod_base = OTHER; note = 2'-O-methoxyethyl modified nucleotide with phosphorothioate linkage
  modified_base 2: mod_base = OTHER; note = 2'-O-methoxyethyl modified 5-methyl cytosine with phosphorothioate linkage
  modified_base 3: mod_base = OTHER; note = 2'-O-methoxyethyl modified thymine with phosphorothioate linkage
  modified_base 4: mod_base = OTHER; note = 2'-O-methoxyethyl modified thymine with phosphorothioate linkage
  modified_base 5: mod_base = OTHER; note = 2'-O-methoxyethyl modified thymine with phosphorothioate linkage
  modified_base 6: mod_base = OTHER; note = Constrained ethyl modified 5-methyl cytosine with phosphorothioate linkage
  modified_base 7: mod_base = OTHER; note = 2'-O-methoxyethyl modified nucleotide with phosphorothioate linkage
  modified_base 8: mod_base = OTHER; note = 2'-O-methoxyethyl modified thymine with phosphorothioate linkage
  modified_base 9: mod_base = OTHER; note = Constrained ethyl modified nucleotide with phosphorothioate linkage
  modified_base 10: mod_base = OTHER; note = 2'-O-methoxyethyl modified nucleotide with phosphorothioate linkage
  modified_base 11: mod_base = OTHER; note = 2'-O-methoxyethyl modified thymine with phosphorothioate linkage
  modified_base 12: mod_base = OTHER; note = Constrained ethyl modified nucleotide with phosphorothioate linkage
  modified_base 13: mod_base = OTHER; note = 2'-O-methoxyethyl modified 5-methyl cytosine with phosphorothioate linkage
  modified_base 14: mod_base = OTHER; note = 2'-O-methoxyethyl modified thymine with phosphorothioate linkage
  modified_base 15: mod_base = OTHER; note = 2'-O-methoxyethyl modified nucleotide with phosphorothioate linkage
  modified_base 16: mod_base = OTHER; note = 2'-O-methoxyethyl modified nucleotide with phosphorothioate linkage
  modified_base 17: mod_base = OTHER; note = 2'-O-methoxyethyl modified 5-methyl cytosine
actttcataatgctggc

SEQ ID NO: 240 - RNA, 17 nt, synthetic construct
  source 1..17: mol_type = other RNA
  modified_base 1: mod_base = OTHER; note = 2'-O-methoxyethyl modified nucleotide with phosphorothioate linkage
  modified_base 2: mod_base = OTHER; note = 2'-O-methoxyethyl modified 5-methyl cytosine with phosphorothioate linkage
  modified_base 3: mod_base = OTHER; note = 2'-O-methoxyethyl modified thymine with phosphorothioate linkage
  modified_base 4: mod_base = OTHER; note = 2'-O-methoxyethyl modified thymine with phosphorothioate linkage
  modified_base 5: mod_base = OTHER; note = 2'-O-methoxyethyl modified thymine with phosphorothioate linkage
  modified_base 6: mod_base = OTHER; note = Constrained ethyl modified 5-methyl cytosine with phosphorothioate linkage
  modified_base 7: mod_base = OTHER; note = 2'-O-methoxyethyl modified nucleotide with phosphorothioate linkage
  modified_base 8: mod_base = OTHER; note = 2'-O-methoxyethyl modified thymine with phosphorothioate linkage
  modified_base 9: mod_base = OTHER; note = 2'-O-methoxyethyl modified nucleotide with phosphorothioate linkage
  modified_base 10: mod_base = OTHER; note = 2'-O-methoxyethyl modified nucleotide with phosphorothioate linkage
  modified_base 11: mod_base = OTHER; note = 2'-O-methoxyethyl modified thymine with phosphorothioate linkage
  modified_base 12: mod_base = OTHER; note = Constrained ethyl modified nucleotide with phosphorothioate linkage
  modified_base 13: mod_base = OTHER; note = 2'-O-methoxyethyl modified 5-methyl cytosine with phosphorothioate linkage
  modified_base 14: mod_base = OTHER; note = 2'-O-methoxyethyl modified thymine with phosphorothioate linkage
  modified_base 15: mod_base = OTHER; note = 2'-O-methoxyethyl modified nucleotide with phosphorothioate linkage
  modified_base 16: mod_base = OTHER; note = 2'-O-methoxyethyl modified nucleotide with phosphorothioate linkage
  modified_base 17: mod_base = OTHER; note = 2'-O-methoxyethyl modified 5-methyl cytosine
actttcataatgctggc

SEQ ID NO: 241 - RNA, 17 nt, synthetic construct
  source 1..17: mol_type = other RNA
  modified_base 1: mod_base = OTHER; note = Constrained ethyl modified nucleotide with phosphorothioate linkage
  modified_base 2: mod_base = OTHER; note = 2'-O-methoxyethyl modified 5-methyl cytosine with phosphorothioate linkage
  modified_base 3: mod_base = OTHER; note = 2'-O-methoxyethyl modified thymine with phosphorothioate linkage
  modified_base 4: mod_base = OTHER; note = Constrained ethyl modified thymine with phosphorothioate linkage
  modified_base 5: mod_base = OTHER; note = 2'-O-methoxyethyl modified thymine with phosphorothioate linkage
  modified_base 6: mod_base = OTHER; note = 2'-O-methoxyethyl modified 5-methyl cytosine with phosphorothioate linkage
  modified_base 7: mod_base = OTHER; note = Constrained ethyl modified nucleotide with phosphorothioate linkage
  modified_base 8: mod_base = OTHER; note = 2'-O-methoxyethyl modified thymine with phosphorothioate linkage
  modified_base 9: mod_base = OTHER; note = 2'-O-methoxyethyl modified nucleotide with phosphorothioate linkage
  modified_base 10: mod_base = OTHER; note = Constrained ethyl modified nucleotide with phosphorothioate linkage
  modified_base 11: mod_base = OTHER; note = 2'-O-methoxyethyl modified thymine with phosphorothioate linkage
  modified_base 12: mod_base = OTHER; note = 2'-O-methoxyethyl modified nucleotide with phosphorothioate linkage
  modified_base 13: mod_base = OTHER; note = 2'-O-methoxyethyl modified 5-methyl cytosine with phosphorothioate linkage
  modified_base 14: mod_base = OTHER; note = 2'-O-methoxyethyl modified thymine with phosphorothioate linkage
  modified_base 15: mod_base = OTHER; note = 2'-O-methoxyethyl modified nucleotide with phosphorothioate linkage
  modified_base 16: mod_base = OTHER; note = 2'-O-methoxyethyl modified nucleotide with phosphorothioate linkage
  modified_base 17: mod_base = OTHER; note = 2'-O-methoxyethyl modified 5-methyl cytosine
actttcataatgctggc

SEQ ID NO: 242 - RNA, 17 nt, synthetic construct
  source 1..17: mol_type = other RNA
  modified_base 1: mod_base = OTHER; note = 2'-O-methoxyethyl modified nucleotide with phosphorothioate linkage
  modified_base 2: mod_base = OTHER; note = 2'-O-methoxyethyl modified 5-methyl cytosine with phosphorothioate linkage
  modified_base 3: mod_base = OTHER; note = 2'-O-methoxyethyl modified thymine with phosphorothioate linkage
  modified_base 4: mod_base = OTHER; note = 2'-O-methoxyethyl modified thymine with phosphorothioate linkage
  modified_base 5: mod_base = OTHER; note = 2'-O-methoxyethyl modified thymine with phosphorothioate linkage
  modified_base 6: mod_base = OTHER; note = 2'-O-methoxyethyl modified 5-methyl cytosine with phosphorothioate linkage
  modified_base 7: mod_base = OTHER; note = 2'-O-methoxyethyl modified nucleotide with phosphorothioate linkage
  modified_base 8: mod_base = OTHER; note = Constrained ethyl modified thymine with phosphorothioate linkage
  modified_base 9: mod_base = OTHER; note = 2'-O-methoxyethyl modified nucleotide with phosphorothioate linkage
  modified_base 10: mod_base = OTHER; note = 2'-O-methoxyethyl modified nucleotide with phosphorothioate linkage
  modified_base 11: mod_base = OTHER; note = Constrained ethyl modified thymine with phosphorothioate linkage
  modified_base 12: mod_base = OTHER; note = 2'-O-methoxyethyl modified nucleotide with phosphorothioate linkage
  modified_base 13: mod_base = OTHER; note = 2'-O-methoxyethyl modified 5-methyl cytosine with phosphorothioate linkage
  modified_base 14: mod_base = OTHER; note = Constrained ethyl modified thymine with phosphorothioate linkage
  modified_base 15: mod_base = OTHER; note = 2'-O-methoxyethyl modified nucleotide with phosphorothioate linkage
  modified_base 16: mod_base = OTHER; note = 2'-O-methoxyethyl modified nucleotide with phosphorothioate linkage
  modified_base 17: mod_base = OTHER; note = Constrained ethyl modified 5-methyl cytosine
actttcataatgctggc

SEQ ID NO: 243 - RNA, 17 nt, synthetic construct
  source 1..17: mol_type = other RNA
  modified_base 1: mod_base = OTHER; note = Constrained ethyl modified nucleotide with phosphorothioate linkage
  modified_base 2: mod_base = OTHER; note = 2'-O-methoxyethyl modified 5-methyl cytosine with phosphorothioate linkage
  modified_base 3: mod_base = OTHER; note = 2'-O-methoxyethyl modified thymine with phosphorothioate linkage
  modified_base 4: mod_base = OTHER; note = Constrained ethyl modified thymine with phosphorothioate linkage
  modified_base 5: mod_base = OTHER; note = 2'-O-methoxyethyl modified thymine with phosphorothioate linkage
  modified_base 6: mod_base = OTHER; note = 2'-O-methoxyethyl modified 5-methyl cytosine with phosphorothioate linkage
  modified_base 7: mod_base = OTHER; note = Constrained ethyl modified nucleotide with phosphorothioate linkage
  modified_base 8: mod_base = OTHER; note = 2'-O-methoxyethyl modified thymine with phosphorothioate linkage
  modified_base 9: mod_base = OTHER; note = 2'-O-methoxyethyl modified nucleotide with phosphorothioate linkage
  modified_base 10: mod_base = OTHER; note = 2'-O-methoxyethyl modified nucleotide with phosphorothioate linkage
  modified_base 11: mod_base = OTHER; note = 2'-O-methoxyethyl modified thymine with phosphorothioate linkage
  modified_base 12: mod_base = OTHER; note = 2'-O-methoxyethyl modified nucleotide with phosphorothioate linkage
  modified_base 13: mod_base = OTHER; note = 2'-O-methoxyethyl modified 5-methyl cytosine with phosphorothioate linkage
  modified_base 14: mod_base = OTHER; note = 2'-O-methoxyethyl modified thymine with phosphorothioate linkage
  modified_base 15: mod_base = OTHER; note = 2'-O-methoxyethyl modified nucleotide with phosphorothioate linkage
  modified_base 16: mod_base = OTHER; note = 2'-O-methoxyethyl modified nucleotide with phosphorothioate linkage
  modified_base 17: mod_base = OTHER; note = 2'-O-methoxyethyl modified 5-methyl cytosine
actttcataatgctggc

SEQ ID NO: 244 - RNA, 17 nt, synthetic construct
  source 1..17: mol_type = other RNA
  modified_base 1: mod_base = OTHER; note = 2'-O-methoxyethyl modified nucleotide with phosphorothioate linkage
  modified_base 2: mod_base = OTHER; note = 2'-O-methoxyethyl modified 5-methyl cytosine with phosphorothioate linkage
  modified_base 3: mod_base = OTHER; note = 2'-O-methoxyethyl modified thymine with phosphorothioate linkage
  modified_base 4: mod_base = OTHER; note = 2'-O-methoxyethyl modified thymine with phosphorothioate linkage
  modified_base 5: mod_base = OTHER; note = 2'-O-methoxyethyl modified thymine with phosphorothioate linkage
  modified_base 6: mod_base = OTHER; note = 2'-O-methoxyethyl modified 5-methyl cytosine with phosphorothioate linkage
  modified_base 7: mod_base = OTHER; note = 2'-O-methoxyethyl modified nucleotide with phosphorothioate linkage
  modified_base 8: mod_base = OTHER; note = 2'-O-methoxyethyl modified thymine with phosphorothioate linkage
  modified_base 9: mod_base = OTHER; note = 2'-O-methoxyethyl modified nucleotide with phosphorothioate linkage
  modified_base 10: mod_base = OTHER; note = 2'-O-methoxyethyl modified nucleotide with phosphorothioate linkage
  modified_base 11: mod_base = OTHER; note = Constrained ethyl modified thymine with phosphorothioate linkage
  modified_base 12: mod_base = OTHER; note = 2'-O-methoxyethyl modified nucleotide with phosphorothioate linkage
  modified_base 13: mod_base = OTHER; note = 2'-O-methoxyethyl modified 5-methyl cytosine with phosphorothioate linkage
  modified_base 14: mod_base = OTHER; note = Constrained ethyl modified thymine with phosphorothioate linkage
  modified_base 15: mod_base = OTHER; note = 2'-O-methoxyethyl modified nucleotide with phosphorothioate linkage
  modified_base 16: mod_base = OTHER; note = 2'-O-methoxyethyl modified nucleotide with phosphorothioate linkage
  modified_base 17: mod_base = OTHER; note = Constrained ethyl modified 5-methyl cytosine
actttcataatgctggc

SEQ ID NO: 245 - RNA, 17 nt, synthetic construct
  source 1..17: mol_type = other RNA
  modified_base 1: mod_base = OTHER; note = Constrained ethyl modified nucleotide with phosphorothioate linkage
  modified_base 2: mod_base = OTHER; note = 2'-O-methoxyethyl modified 5-methyl cytosine with phosphorothioate linkage
  modified_base 3: mod_base = OTHER; note = 2'-O-methoxyethyl modified thymine with phosphorothioate linkage
  modified_base 4: mod_base = OTHER; note = Constrained ethyl modified thymine with phosphorothioate linkage
  modified_base 5: mod_base = OTHER; note = 2'-O-methoxyethyl modified thymine with phosphorothioate linkage
  modified_base 6: mod_base = OTHER; note = 2'-O-methoxyethyl modified 5-methyl cytosine with phosphorothioate linkage
  modified_base 7: mod_base = OTHER; note = 2'-O-methoxyethyl modified nucleotide with phosphorothioate linkage
  modified_base 8: mod_base = OTHER; note = 2'-O-methoxyethyl modified thymine with phosphorothioate linkage
  modified_base 9: mod_base = OTHER; note = 2'-O-methoxyethyl modified nucleotide with phosphorothioate linkage
  modified_base 10: mod_base = OTHER; note = 2'-O-methoxyethyl modified nucleotide with phosphorothioate linkage
  modified_base 11: mod_base = OTHER; note = 2'-O-methoxyethyl modified thymine with phosphorothioate linkage
  modified_base 12: mod_base = OTHER; note = 2'-O-methoxyethyl modified nucleotide with phosphorothioate linkage
  modified_base 13: mod_base = OTHER; note = 2'-O-methoxyethyl modified 5-methyl cytosine with phosphorothioate linkage
  modified_base 14: mod_base = OTHER; note = 2'-O-methoxyethyl modified thymine with phosphorothioate linkage
  modified_base 15: mod_base = OTHER; note = 2'-O-methoxyethyl modified nucleotide with phosphorothioate linkage
  modified_base 16: mod_base = OTHER; note = 2'-O-methoxyethyl modified nucleotide with phosphorothioate linkage
  modified_base 17: mod_base = OTHER; note = 2'-O-methoxyethyl modified 5-methyl cytosine
actttcataatgctggc

SEQ ID NO: 246 - RNA, 17 nt, synthetic construct
  source 1..17: mol_type = other RNA
  modified_base 1: mod_base = OTHER; note = 2'-O-methoxyethyl modified nucleotide with phosphorothioate linkage
  modified_base 2: mod_base = OTHER; note = 2'-O-methoxyethyl modified 5-methyl cytosine with phosphorothioate linkage
  modified_base 3: mod_base = OTHER; note = 2'-O-methoxyethyl modified thymine with phosphorothioate linkage
  modified_base 4: mod_base = OTHER; note = 2'-O-methoxyethyl modified thymine with phosphorothioate linkage
  modified_base 5: mod_base = OTHER; note = 2'-O-methoxyethyl modified thymine with phosphorothioate linkage
  modified_base 6: mod_base = OTHER; note = 2'-O-methoxyethyl modified 5-methyl cytosine with phosphorothioate linkage
  modified_base 7: mod_base = OTHER; note = 2'-O-methoxyethyl modified nucleotide with phosphorothioate linkage
  modified_base 8: mod_base = OTHER; note = 2'-O-methoxyethyl modified thymine with phosphorothioate linkage
  modified_base 9: mod_base = OTHER; note = 2'-O-methoxyethyl modified nucleotide with phosphorothioate linkage
  modified_base 10: mod_base = OTHER; note = 2'-O-methoxyethyl modified nucleotide with phosphorothioate linkage
  modified_base 11: mod_base = OTHER; note = 2'-O-methoxyethyl modified thymine with phosphorothioate linkage
  modified_base 12: mod_base = OTHER; note = 2'-O-methoxyethyl modified nucleotide with phosphorothioate linkage
  modified_base 13: mod_base = OTHER; note = 2'-O-methoxyethyl modified 5-methyl cytosine with phosphorothioate linkage
  modified_base 14: mod_base = OTHER; note = Constrained ethyl modified thymine with phosphorothioate linkage
  modified_base 15: mod_base = OTHER; note = 2'-O-methoxyethyl modified nucleotide with phosphorothioate linkage
  modified_base 16: mod_base = OTHER; note = 2'-O-methoxyethyl modified nucleotide with phosphorothioate linkage
  modified_base 17: mod_base = OTHER; note = Constrained ethyl modified 5-methyl cytosine
actttcataatgctggc

SEQ ID NO: 247 - RNA, 16 nt, synthetic construct
  source 1..16: mol_type = other RNA
  modified_base 1: mod_base = OTHER; note = Constrained ethyl modified 5-methyl cytosine with phosphorothioate linkage
  modified_base 2: mod_base = OTHER; note = 2'-O-methoxyethyl modified thymine with phosphorothioate linkage
  modified_base 3: mod_base = OTHER; note = 2'-O-methoxyethyl modified thymine with phosphorothioate linkage
  modified_base 4: mod_base = OTHER; note = Constrained ethyl modified thymine with phosphorothioate linkage
  modified_base 5: mod_base = OTHER; note = 2'-O-methoxyethyl modified 5-methyl cytosine with phosphorothioate linkage
  modified_base 6: mod_base = OTHER; note = 2'-O-methoxyethyl modified nucleotide with phosphorothioate linkage
  modified_base 7: mod_base = OTHER; note = Constrained ethyl modified thymine with phosphorothioate linkage
  modified_base 8: mod_base = OTHER; note = 2'-O-methoxyethyl modified nucleotide with phosphorothioate linkage
  modified_base 9: mod_base = OTHER; note = 2'-O-methoxyethyl modified nucleotide with phosphorothioate linkage
  modified_base 10: mod_base = OTHER; note = Constrained ethyl modified thymine with phosphorothioate linkage
  modified_base 11: mod_base = OTHER; note = 2'-O-methoxyethyl modified nucleotide with phosphorothioate linkage
  modified_base 12: mod_base = OTHER; note = 2'-O-methoxyethyl modified 5-methyl cytosine with phosphorothioate linkage
  modified_base 13: mod_base = OTHER; note = Constrained ethyl modified thymine with phosphorothioate linkage
  modified_base 14: mod_base = OTHER; note = 2'-O-methoxyethyl modified nucleotide with phosphorothioate linkage
  modified_base 15: mod_base = OTHER; note = 2'-O-methoxyethyl modified nucleotide with phosphorothioate linkage
  modified_base 16: mod_base = OTHER; note = Constrained ethyl modified 5-methyl cytosine
ctttcataatgctggc

SEQ ID NO: 248 - RNA, 16 nt, synthetic construct
  source 1..16: mol_type = other RNA
  modified_base 1: mod_base = OTHER; note = Constrained ethyl modified 5-methyl cytosine with phosphorothioate linkage
  modified_base 2: mod_base = OTHER; note = 2'-O-methoxyethyl modified thymine with phosphorothioate linkage
  modified_base 3: mod_base = OTHER; note = 2'-O-methoxyethyl modified thymine with phosphorothioate linkage
  modified_base 4: mod_base = OTHER; note = 2'-O-methoxyethyl modified thymine with phosphorothioate linkage
  modified_base 5: mod_base = OTHER; note = Constrained ethyl modified 5-methyl cytosine with phosphorothioate linkage
  modified_base 6: mod_base = OTHER; note = 2'-O-methoxyethyl modified nucleotide with phosphorothioate linkage
  modified_base 7: mod_base = OTHER; note = 2'-O-methoxyethyl modified thymine with phosphorothioate linkage
  modified_base 8: mod_base = OTHER; note = 2'-O-methoxyethyl modified nucleotide with phosphorothioate linkage
  modified_base 9: mod_base = OTHER; note = Constrained ethyl modified nucleotide with phosphorothioate linkage
  modified_base 10: mod_base = OTHER; note = 2'-O-methoxyethyl modified thymine with phosphorothioate linkage
  modified_base 11: mod_base = OTHER; note = 2'-O-methoxyethyl modified nucleotide with phosphorothioate linkage
  modified_base 12: mod_base = OTHER; note = 2'-O-methoxyethyl modified 5-methyl cytosine with phosphorothioate linkage
  modified_base 13: mod_base = OTHER; note = Constrained ethyl modified thymine with phosphorothioate linkage
  modified_base 14: mod_base = OTHER; note = 2'-O-methoxyethyl modified nucleotide with phosphorothioate linkage
  modified_base 15: mod_base = OTHER; note = 2'-O-methoxyethyl modified nucleotide with phosphorothioate linkage
  modified_base 16: mod_base = OTHER; note = Constrained ethyl modified 5-methyl cytosine
ctttcataatgctggc

SEQ ID NO: 249 - RNA, 16 nt, synthetic construct
  source 1..16: mol_type = other RNA
  modified_base 1: mod_base = OTHER; note = Constrained ethyl modified 5-methyl cytosine with phosphorothioate linkage
  modified_base 2: mod_base = OTHER; note = 2'-O-methoxyethyl modified thymine with phosphorothioate linkage
  modified_base 3: mod_base = OTHER; note = 2'-O-methoxyethyl modified thymine with phosphorothioate linkage
  modified_base 4: mod_base = OTHER; note = 2'-O-methoxyethyl modified thymine with phosphorothioate linkage
  modified_base 5: mod_base = OTHER; note = 2'-O-methoxyethyl modified 5-methyl cytosine with phosphorothioate linkage
  modified_base 6: mod_base = OTHER; note = Constrained ethyl modified nucleotide with phosphorothioate linkage
  modified_base 7: mod_base = OTHER; note = 2'-O-methoxyethyl modified thymine with phosphorothioate linkage
  modified_base 8: mod_base = OTHER; note = 2'-O-methoxyethyl modified nucleotide with phosphorothioate linkage
  modified_base 9: mod_base = OTHER; note = 2'-O-methoxyethyl modified nucleotide with phosphorothioate linkage
  modified_base 10: mod_base = OTHER; note = 2'-O-methoxyethyl modified thymine with phosphorothioate linkage
  modified_base 11: mod_base = OTHER; note = Constrained ethyl modified nucleotide with phosphorothioate linkage
  modified_base 12: mod_base = OTHER; note = 2'-O-methoxyethyl modified 5-methyl cytosine with phosphorothioate linkage
  modified_base 13: mod_base = OTHER; note = 2'-O-methoxyethyl modified thymine with phosphorothioate linkage
  modified_base 14: mod_base = OTHER; note = 2'-O-methoxyethyl modified nucleotide with phosphorothioate linkage
  modified_base 15: mod_base = OTHER; note = 2'-O-methoxyethyl modified nucleotide with phosphorothioate linkage
  modified_base 16: mod_base = OTHER; note = Constrained ethyl modified 5-methyl cytosine
ctttcataatgctggc

SEQ ID NO: 250 - RNA, 16 nt, synthetic construct
  source 1..16: mol_type = other RNA
  modified_base 1: mod_base = OTHER; note = Constrained ethyl modified 5-methyl cytosine with phosphorothioate linkage
  modified_base 2: mod_base = OTHER; note = 2'-O-methoxyethyl modified thymine with phosphorothioate linkage
  modified_base 3: mod_base = OTHER; note = 2'-O-methoxyethyl modified thymine with phosphorothioate linkage
  modified_base 4: mod_base = OTHER; note = 2'-O-methoxyethyl modified thymine with phosphorothioate linkage
  modified_base 5: mod_base = OTHER; note = 2'-O-methoxyethyl modified 5-methyl cytosine with phosphorothioate linkage
  modified_base 6: mod_base = OTHER; note = 2'-O-methoxyethyl modified nucleotide with phosphorothioate linkage
  modified_base 7: mod_base = OTHER; note = 2'-O-methoxyethyl modified thymine with phosphorothioate linkage
  modified_base 8: mod_base = OTHER; note = 2'-O-methoxyethyl modified nucleotide with phosphorothioate linkage
  modified_base 9: mod_base = OTHER; note = Constrained ethyl modified nucleotide with phosphorothioate linkage
  modified_base 10: mod_base = OTHER; note = 2'-O-methoxyethyl modified thymine with phosphorothioate linkage
  modified_base 11: mod_base = OTHER; note = 2'-O-methoxyethyl modified nucleotide with phosphorothioate linkage
  modified_base 12: mod_base = OTHER; note = 2'-O-methoxyethyl modified 5-methyl cytosine with phosphorothioate linkage
  modified_base 13: mod_base = OTHER; note = 2'-O-methoxyethyl modified thymine with phosphorothioate linkage
  modified_base 14: mod_base = OTHER; note = 2'-O-methoxyethyl modified nucleotide with phosphorothioate linkage
  modified_base 15: mod_base = OTHER; note = 2'-O-methoxyethyl modified nucleotide with phosphorothioate linkage
  modified_base 16: mod_base = OTHER; note = Constrained ethyl modified 5-methyl cytosine
ctttcataatgctggc

SEQ ID NO: 251 - RNA, 16 nt, synthetic construct
  source 1..16: mol_type = other RNA
  modified_base 1: mod_base = OTHER; note = Constrained ethyl modified 5-methyl cytosine with phosphorothioate linkage
  modified_base 2: mod_base = OTHER; note = 2'-O-methoxyethyl modified thymine with phosphorothioate linkage
  modified_base 3: mod_base = OTHER; note = 2'-O-methoxyethyl modified thymine with phosphorothioate linkage
  modified_base 4: mod_base = OTHER; note = 2'-O-methoxyethyl modified thymine with phosphorothioate linkage
  modified_base 5: mod_base = OTHER; note = 2'-O-methoxyethyl modified 5-methyl cytosine with phosphorothioate linkage
  modified_base 6: mod_base = OTHER; note = 2'-O-methoxyethyl modified nucleotide with phosphorothioate linkage
  modified_base 7: mod_base = OTHER; note = 2'-O-methoxyethyl modified thymine with phosphorothioate linkage
  modified_base 8: mod_base = OTHER; note = 2'-O-methoxyethyl modified nucleotide with phosphorothioate linkage
  modified_base 9: mod_base = OTHER; note = 2'-O-methoxyethyl modified nucleotide with phosphorothioate linkage
  modified_base 10: mod_base = OTHER; note = 2'-O-methoxyethyl modified thymine with phosphorothioate linkage
  modified_base 11: mod_base = OTHER; note = 2'-O-methoxyethyl modified nucleotide with phosphorothioate linkage
  modified_base 12: mod_base = OTHER; note = 2'-O-methoxyethyl modified 5-methyl cytosine with phosphorothioate linkage
  modified_base 13: mod_base = OTHER; note = 2'-O-methoxyethyl modified thymine with phosphorothioate linkage
  modified_base 14: mod_base = OTHER; note = 2'-O-methoxyethyl modified nucleotide with phosphorothioate linkage
  modified_base 15: mod_base = OTHER; note = 2'-O-methoxyethyl modified nucleotide with phosphorothioate linkage
  modified_base 16: mod_base = OTHER; note = Constrained ethyl modified 5-methyl cytosine
ctttcataatgctggc

SEQ ID NO: 252 - RNA, 16 nt, synthetic construct
  source 1..16: mol_type = other RNA
  modified_base 1: mod_base = OTHER; note = Constrained ethyl modified 5-methyl cytosine with phosphorothioate linkage
  modified_base 2: mod_base = OTHER; note = 2'-O-methoxyethyl modified thymine with phosphorothioate linkage
  modified_base 3: mod_base = OTHER; note = Constrained ethyl modified thymine with phosphorothioate linkage
  modified_base 4: mod_base = OTHER; note = 2'-O-methoxyethyl modified thymine with phosphorothioate linkage
  modified_base 5: mod_base = OTHER; note = 2'-O-methoxyethyl modified 5-methyl cytosine with phosphorothioate linkage
  modified_base 6: mod_base = OTHER; note = Constrained ethyl modified nucleotide with phosphorothioate linkage
  modified_base 7: mod_base = OTHER; note = 2'-O-methoxyethyl modified thymine with phosphorothioate linkage
  modified_base 8: mod_base = OTHER; note = 2'-O-methoxyethyl modified nucleotide with phosphorothioate linkage
  modified_base 9: mod_base = OTHER; note = Constrained ethyl modified nucleotide with phosphorothioate linkage
  modified_base 10: mod_base = OTHER; note = 2'-O-methoxyethyl modified thymine with phosphorothioate linkage
  modified_base 11: mod_base = OTHER; note = 2'-O-methoxyethyl modified nucleotide with phosphorothioate linkage
  modified_base 12: mod_base = OTHER; note = Constrained ethyl modified 5-methyl cytosine with phosphorothioate linkage
  modified_base 13: mod_base = OTHER; note = 2'-O-methoxyethyl modified thymine with phosphorothioate linkage
  modified_base 14: mod_base = OTHER; note = 2'-O-methoxyethyl modified nucleotide with phosphorothioate linkage
  modified_base 15: mod_base = OTHER; note = Constrained ethyl modified nucleotide with phosphorothioate linkage
  modified_base 16: mod_base = OTHER; note = 2'-O-methoxyethyl modified 5-methyl cytosine
ctttcataatgctggc

SEQ ID NO: 253 - RNA, 16 nt, synthetic construct
  source 1..16: mol_type = other RNA
  modified_base 1: mod_base = OTHER; note = 2'-O-methoxyethyl modified 5-methyl cytosine with phosphorothioate linkage
  modified_base 2: mod_base = OTHER; note = 2'-O-methoxyethyl modified thymine with phosphorothioate linkage
  modified_base 3: mod_base = OTHER; note = Constrained ethyl modified thymine with phosphorothioate linkage
  modified_base 4: mod_base = OTHER; note = 2'-O-methoxyethyl modified thymine with phosphorothioate linkage
  modified_base 5: mod_base = OTHER; note = 2'-O-methoxyethyl modified 5-methyl cytosine with phosphorothioate linkage
  modified_base 6: mod_base = OTHER; note = Constrained ethyl modified nucleotide with phosphorothioate linkage
  modified_base 7: mod_base = OTHER; note = 2'-O-methoxyethyl modified thymine with phosphorothioate linkage
  modified_base 8: mod_base = OTHER; note = 2'-O-methoxyethyl modified nucleotide with phosphorothioate linkage
  modified_base 9: mod_base = OTHER; note = Constrained ethyl modified nucleotide with phosphorothioate linkage
  modified_base 10: mod_base = OTHER; note = 2'-O-methoxyethyl modified thymine with phosphorothioate linkage
  modified_base 11: mod_base = OTHER; note = 2'-O-methoxyethyl modified nucleotide with phosphorothioate linkage
  modified_base 12: mod_base = OTHER; note = Constrained ethyl modified 5-methyl cytosine with phosphorothioate linkage
  modified_base 13: mod_base = OTHER; note = 2'-O-methoxyethyl modified thymine with phosphorothioate linkage
  modified_base 14: mod_base = OTHER; note = 2'-O-methoxyethyl modified nucleotide with phosphorothioate linkage
  modified_base 15: mod_base = OTHER; note = Constrained ethyl modified nucleotide with phosphorothioate linkage
  modified_base 16: mod_base = OTHER; note = 2'-O-methoxyethyl modified 5-methyl cytosine
ctttcataatgctggc

SEQ ID NO: 254 - RNA, 16 nt, synthetic construct
  source 1..16: mol_type = other RNA
  modified_base 1: mod_base = OTHER; note = 2'-O-methoxyethyl modified 5-methyl cytosine with phosphorothioate linkage
  modified_base 2: mod_base = OTHER; note = 2'-O-methoxyethyl modified thymine with phosphorothioate linkage
  modified_base 3: mod_base = OTHER; note = 2'-O-methoxyethyl modified thymine with phosphorothioate linkage
  modified_base 4: mod_base = OTHER; note = 2'-O-methoxyethyl modified thymine with phosphorothioate linkage
  modified_base 5: mod_base = OTHER; note = 2'-O-methoxyethyl modified 5-methyl cytosine with phosphorothioate linkage
  modified_base 6: mod_base = OTHER; note = Constrained ethyl modified nucleotide with phosphorothioate linkage
  modified_base 7: mod_base = OTHER; note = 2'-O-methoxyethyl modified thymine with phosphorothioate linkage
  modified_base 8: mod_base = OTHER; note = 2'-O-methoxyethyl modified nucleotide with phosphorothioate linkage
  modified_base 9: mod_base = OTHER; note = Constrained ethyl modified nucleotide with phosphorothioate linkage
  modified_base 10: mod_base = OTHER; note = 2'-O-methoxyethyl modified thymine with phosphorothioate linkage
  modified_base 11: mod_base = OTHER; note = 2'-O-methoxyethyl modified nucleotide with phosphorothioate linkage
  modified_base 12: mod_base = OTHER; note = Constrained ethyl modified 5-methyl cytosine with phosphorothioate linkage
  modified_base 13: mod_base = OTHER; note = 2'-O-methoxyethyl modified thymine with phosphorothioate linkage
  modified_base 14: mod_base = OTHER; note = 2'-O-methoxyethyl modified nucleotide with phosphorothioate linkage
  modified_base 15: mod_base = OTHER; note = Constrained ethyl modified nucleotide with phosphorothioate linkage
  modified_base 16: mod_base = OTHER; note = 2'-O-methoxyethyl modified 5-methyl cytosine
ctttcataatgctggc

SEQ ID NO: 255 - RNA, 16 nt, synthetic construct
  source 1..16: mol_type = other RNA
  modified_base 1: mod_base = OTHER; note = 2'-O-methoxyethyl modified 5-methyl cytosine with phosphorothioate linkage
  modified_base 2: mod_base = OTHER; note = 2'-O-methoxyethyl modified thymine with phosphorothioate linkage
  modified_base 3: mod_base = OTHER; note = 2'-O-methoxyethyl modified thymine with phosphorothioate linkage
  modified_base 4: mod_base = OTHER; note = 2'-O-methoxyethyl modified thymine with phosphorothioate linkage
  modified_base 5: mod_base = OTHER; note = 2'-O-methoxyethyl modified 5-methyl cytosine with phosphorothioate linkage
  modified_base 6: mod_base = OTHER; note = Constrained ethyl modified nucleotide with phosphorothioate linkage
  modified_base 7: mod_base = OTHER; note = 2'-O-methoxyethyl modified thymine with phosphorothioate linkage
  modified_base 8: mod_base = OTHER; note = 2'-O-methoxyethyl modified nucleotide with phosphorothioate linkage
  modified_base 9: mod_base = OTHER; note = Constrained ethyl modified nucleotide with phosphorothioate linkage
  modified_base 10: mod_base = OTHER; note = 2'-O-methoxyethyl modified thymine with phosphorothioate linkage
  modified_base 11: mod_base = OTHER; note = 2'-O-methoxyethyl modified nucleotide with phosphorothioate linkage
  modified_base 12: mod_base = OTHER; note = Constrained ethyl modified 5-methyl cytosine with phosphorothioate linkage
  modified_base 13: mod_base = OTHER; note = 2'-O-methoxyethyl modified thymine with phosphorothioate linkage
  modified_base 14: mod_base = OTHER; note = 2'-O-methoxyethyl modified nucleotide with phosphorothioate linkage
  modified_base 15: mod_base = OTHER; note = 2'-O-methoxyethyl modified nucleotide with phosphorothioate linkage
  modified_base 16: mod_base = OTHER; note = 2'-O-methoxyethyl modified 5-methyl cytosine
ctttcataatgctggc

SEQ ID NO: 256 - RNA, 16 nt, synthetic construct
  source 1..16: mol_type = other RNA
  modified_base 1: mod_base = OTHER; note = 2'-O-methoxyethyl modified 5-methyl cytosine with phosphorothioate linkage
  modified_base 2: mod_base = OTHER; note = 2'-O-methoxyethyl modified thymine with phosphorothioate linkage
  modified_base 3: mod_base = OTHER; note = 2'-O-methoxyethyl modified thymine with phosphorothioate linkage
  modified_base 4: mod_base = OTHER; note = 2'-O-methoxyethyl modified thymine with phosphorothioate linkage
  modified_base 5: mod_base = OTHER; note = 2'-O-methoxyethyl modified 5-methyl cytosine with phosphorothioate linkage
  modified_base 6: mod_base = OTHER; note = Constrained ethyl modified nucleotide with phosphorothioate linkage
  modified_base 7: mod_base = OTHER; note = 2'-O-methoxyethyl modified thymine with phosphorothioate linkage
  modified_base 8: mod_base = OTHER; note = 2'-O-methoxyethyl modified nucleotide with phosphorothioate linkage
  modified_base 9: mod_base = OTHER; note = 2'-O-methoxyethyl modified nucleotide with phosphorothioate linkage
  modified_base 10: mod_base = OTHER; note = 2'-O-methoxyethyl modified thymine with phosphorothioate linkage
  modified_base 11: mod_base = OTHER; note = 2'-O-methoxyethyl modified nucleotide with phosphorothioate linkage
  modified_base 12: mod_base = OTHER; note = Constrained ethyl modified 5-methyl cytosine with phosphorothioate linkage
  modified_base 13: mod_base = OTHER; note = 2'-O-methoxyethyl modified thymine with phosphorothioate linkage
  modified_base 14: mod_base = OTHER; note = 2'-O-methoxyethyl modified nucleotide with phosphorothioate linkage
  modified_base 15: mod_base = OTHER; note = 2'-O-methoxyethyl modified nucleotide with phosphorothioate linkage
  modified_base 16: mod_base = OTHER; note = 2'-O-methoxyethyl modified 5-methyl cytosine
ctttcataatgctggc

SEQ ID NO: 257 - RNA, 16 nt, synthetic construct
  source 1..16: mol_type = other RNA
  modified_base 1: mod_base = OTHER; note = Constrained ethyl modified 5-methyl cytosine with phosphorothioate linkage
  modified_base 2: mod_base = OTHER; note = 2'-O-methoxyethyl modified thymine with phosphorothioate linkage
  modified_base 3: mod_base = OTHER; note = 2'-O-methoxyethyl modified thymine with phosphorothioate linkage
  modified_base 4: mod_base = OTHER; note = Constrained ethyl modified thymine with phosphorothioate linkage
  modified_base 5: mod_base = OTHER; note = 2'-O-methoxyethyl modified 5-methyl cytosine with phosphorothioate linkage
  modified_base 6: mod_base = OTHER; note = 2'-O-methoxyethyl modified nucleotide with phosphorothioate linkage
  modified_base 7: mod_base = OTHER; note = Constrained ethyl modified thymine with phosphorothioate linkage
  modified_base 8: mod_base = OTHER; note = 2'-O-methoxyethyl modified nucleotide with phosphorothioate linkage
  modified_base 9: mod_base = OTHER; note = 2'-O-methoxyethyl modified nucleotide with phosphorothioate linkage
  modified_base 10: mod_base = OTHER; note = Constrained ethyl modified thymine with phosphorothioate linkage
  modified_base 11: mod_base = OTHER; note = 2'-O-methoxyethyl modified nucleotide with phosphorothioate linkage
  modified_base 12: mod_base = OTHER; note = 2'-O-methoxyethyl modified 5-methyl cytosine with phosphorothioate linkage
  modified_base 13: mod_base = OTHER; note = 2'-O-methoxyethyl modified thymine with phosphorothioate linkage
  modified_base 14: mod_base = OTHER; note = 2'-O-methoxyethyl modified nucleotide with phosphorothioate linkage
  modified_base 15: mod_base = OTHER; note = 2'-O-methoxyethyl modified nucleotide with phosphorothioate linkage
  modified_base 16: mod_base = OTHER; note = 2'-O-methoxyethyl modified 5-methyl cytosine
ctttcataatgctggc

SEQ ID NO: 258 - RNA, 16 nt, synthetic construct
  source 1..16: mol_type = other RNA
  modified_base 1: mod_base = OTHER; note = 2'-O-methoxyethyl modified 5-methyl cytosine with phosphorothioate linkage
  modified_base 2: mod_base = OTHER; note = 2'-O-methoxyethyl modified thymine with phosphorothioate linkage
  modified_base 3: mod_base = OTHER; note = 2'-O-methoxyethyl modified thymine with phosphorothioate linkage
  modified_base 4: mod_base = OTHER; note = 2'-O-methoxyethyl modified thymine with phosphorothioate linkage
  modified_base 5: mod_base = OTHER; note = 2'-O-methoxyethyl modified 5-methyl cytosine with phosphorothioate linkage
  modified_base 6: mod_base = OTHER; note = 2'-O-methoxyethyl modified nucleotide with phosphorothioate linkage
  modified_base 7: mod_base = OTHER; note = Constrained ethyl modified thymine with phosphorothioate linkage
  modified_base 8: mod_base = OTHER; note = 2'-O-methoxyethyl modified nucleotide with phosphorothioate linkage
  modified_base 9: mod_base = OTHER; note = 2'-O-methoxyethyl modified nucleotide with phosphorothioate linkage
  modified_base 10: mod_base = OTHER; note = Constrained ethyl modified thymine with phosphorothioate linkage
  modified_base 11: mod_base = OTHER; note = 2'-O-methoxyethyl modified nucleotide with phosphorothioate linkage
  modified_base 12: mod_base = OTHER; note = 2'-O-methoxyethyl modified 5-methyl cytosine with phosphorothioate linkage
  modified_base 13: mod_base = OTHER; note = Constrained ethyl modified thymine with phosphorothioate linkage
  modified_base 14: mod_base = OTHER; note = 2'-O-methoxyethyl modified nucleotide with phosphorothioate linkage
  modified_base 15: mod_base = OTHER; note = 2'-O-methoxyethyl modified nucleotide with phosphorothioate linkage
  modified_base 16: mod_base = OTHER; note = Constrained ethyl modified 5-methyl cytosine
ctttcataatgctggc

SEQ ID NO: 259 - RNA, 16 nt, synthetic construct
  source 1..16: mol_type = other RNA
  modified_base 1: mod_base = OTHER; note = Constrained ethyl modified 5-methyl cytosine with phosphorothioate linkage
  modified_base 2: mod_base = OTHER; note = 2'-O-methoxyethyl modified thymine with phosphorothioate linkage
  modified_base 3: mod_base = OTHER; note = 2'-O-methoxyethyl modified thymine with phosphorothioate linkage
  modified_base 4: mod_base = OTHER; note = Constrained ethyl modified thymine with phosphorothioate linkage
  modified_base 5: mod_base = OTHER; note = 2'-O-methoxyethyl modified 5-methyl cytosine with phosphorothioate linkage
  modified_base 6: mod_base = OTHER; note = 2'-O-methoxyethyl modified nucleotide with phosphorothioate linkage
  modified_base 7: mod_base = OTHER; note = Constrained ethyl modified thymine with phosphorothioate linkage
  modified_base 8: mod_base = OTHER; note = 2'-O-methoxyethyl modified nucleotide with phosphorothioate linkage
  modified_base 9: mod_base = OTHER; note = 2'-O-methoxyethyl modified nucleotide with phosphorothioate linkage
  modified_base 10: mod_base = OTHER; note = 2'-O-methoxyethyl modified thymine with phosphorothioate linkage
  modified_base 11: mod_base = OTHER; note = 2'-O-methoxyethyl modified nucleotide with phosphorothioate linkage
  modified_base 12: mod_base = OTHER; note = 2'-O-methoxyethyl modified 5-methyl cytosine with phosphorothioate linkage
  modified_base 13: mod_base = OTHER; note = 2'-O-methoxyethyl modified thymine with phosphorothioate linkage
  modified_base 14: mod_base = OTHER; note = 2'-O-methoxyethyl modified nucleotide with phosphorothioate linkage
  modified_base 15: mod_base = OTHER; note = 2'-O-methoxyethyl modified nucleotide with phosphorothioate linkage
  modified_base 16: mod_base = OTHER; note = 2'-O-methoxyethyl modified 5-methyl cytosine
ctttcataatgctggc

SEQ ID NO: 260 - RNA, 16 nt, synthetic construct
  source 1..16: mol_type = other RNA
  modified_base 1: mod_base = OTHER; note = 2'-O-methoxyethyl modified 5-methyl cytosine with phosphorothioate linkage
  modified_base 2: mod_base = OTHER; note = 2'-O-methoxyethyl modified thymine with phosphorothioate linkage
  modified_base 3: mod_base = OTHER; note = 2'-O-methoxyethyl modified thymine with phosphorothioate linkage
  modified_base 4: mod_base = OTHER; note = 2'-O-methoxyethyl modified thymine with phosphorothioate linkage
  modified_base 5: mod_base = OTHER; note = 2'-O-methoxyethyl modified 5-methyl cytosine with phosphorothioate linkage
  modified_base 6: mod_base = OTHER; note = 2'-O-methoxyethyl modified nucleotide with phosphorothioate linkage
  modified_base 7: mod_base = OTHER; note = 2'-O-methoxyethyl modified thymine with phosphorothioate linkage
  modified_base 8: mod_base = OTHER; note = 2'-O-methoxyethyl modified nucleotide with phosphorothioate linkage
  modified_base 9: mod_base = OTHER; note = 2'-O-methoxyethyl modified nucleotide with phosphorothioate linkage
  modified_base 10: mod_base = OTHER; note = Constrained ethyl modified thymine with phosphorothioate linkage
  modified_base 11: mod_base = OTHER; note = 2'-O-methoxyethyl modified nucleotide with phosphorothioate linkage
  modified_base 12: mod_base = OTHER; note = 2'-O-methoxyethyl modified 5-methyl cytosine with phosphorothioate linkage
  modified_base 13: mod_base = OTHER; note = Constrained ethyl modified thymine with phosphorothioate linkage
  modified_base 14: mod_base = OTHER; note = 2'-O-methoxyethyl modified nucleotide with phosphorothioate linkage
  modified_base 15: mod_base = OTHER; note = 2'-O-methoxyethyl modified nucleotide with phosphorothioate linkage
  modified_base 16: mod_base = OTHER; note = Constrained ethyl modified 5-methyl cytosine
ctttcataatgctggc

SEQ ID NO: 261 - RNA, 16 nt, synthetic construct
  source 1..16: mol_type = other RNA
  modified_base 1: mod_base = OTHER; note = Constrained ethyl modified 5-methyl cytosine with phosphorothioate linkage
  modified_base 2: mod_base = OTHER; note = 2'-O-methoxyethyl modified thymine with phosphorothioate linkage
  modified_base 3: mod_base = OTHER; note = 2'-O-methoxyethyl modified thymine with phosphorothioate linkage
  modified_base 4: mod_base = OTHER; note = Constrained ethyl modified thymine with phosphorothioate linkage
  modified_base 5: mod_base = OTHER; note = 2'-O-methoxyethyl modified 5-methyl cytosine with phosphorothioate linkage
  modified_base 6: mod_base = OTHER; note = 2'-O-methoxyethyl modified nucleotide with phosphorothioate linkage
  modified_base 7: mod_base = OTHER; note = 2'-O-methoxyethyl modified thymine with phosphorothioate linkage
  modified_base 8: mod_base = OTHER; note = 2'-O-methoxyethyl modified nucleotide with phosphorothioate linkage
  modified_base 9: mod_base = OTHER; note = 2'-O-methoxyethyl modified nucleotide with phosphorothioate linkage
  modified_base 10: mod_base = OTHER; note = 2'-O-methoxyethyl modified thymine with phosphorothioate linkage
  modified_base 11: mod_base = OTHER; note = 2'-O-methoxyethyl modified nucleotide with phosphorothioate linkage
  modified_base 12: mod_base = OTHER; note = 2'-O-methoxyethyl modified 5-methyl cytosine with phosphorothioate linkage
  modified_base 13: mod_base = OTHER; note = 2'-O-methoxyethyl modified thymine with phosphorothioate linkage
  modified_base 14: mod_base = OTHER; note = 2'-O-methoxyethyl modified nucleotide with phosphorothioate linkage
  modified_base 15: mod_base = OTHER; note = 2'-O-methoxyethyl modified nucleotide with phosphorothioate linkage
  modified_base 16: mod_base = OTHER; note = 2'-O-methoxyethyl modified 5-methyl cytosine
ctttcataatgctggc

SEQ ID NO: 262 - RNA, 16 nt, synthetic construct
  source 1..16: mol_type = other RNA
  modified_base 1: mod_base = OTHER; note = 2'-O-methoxyethyl modified 5-methyl cytosine with phosphorothioate linkage
  modified_base 2: mod_base = OTHER; note = 2'-O-methoxyethyl modified thymine with phosphorothioate linkage
  modified_base 3: mod_base = OTHER; note = 2'-O-methoxyethyl modified thymine with phosphorothioate linkage
  modified_base 4: mod_base = OTHER; note = 2'-O-methoxyethyl modified thymine with phosphorothioate linkage
  modified_base 5: mod_base = OTHER; note = 2'-O-methoxyethyl modified 5-methyl cytosine with phosphorothioate linkage
  modified_base 6: mod_base = OTHER; note = 2'-O-methoxyethyl modified nucleotide with phosphorothioate linkage
  modified_base 7: mod_base = OTHER; note = 2'-O-methoxyethyl modified thymine with phosphorothioate linkage
  modified_base 8: mod_base = OTHER; note = 2'-O-methoxyethyl modified nucleotide with phosphorothioate linkage
  modified_base 9: mod_base = OTHER; note = 2'-O-methoxyethyl modified nucleotide with phosphorothioate linkage
  modified_base 10: mod_base = OTHER; note = 2'-O-methoxyethyl modified thymine with phosphorothioate linkage
  modified_base 11: mod_base = OTHER; note = 2'-O-methoxyethyl modified nucleotide with phosphorothioate linkage
  modified_base 12: mod_base = OTHER; note = 2'-O-methoxyethyl modified 5-methyl cytosine with phosphorothioate linkage
  modified_base 13: mod_base = OTHER; note = Constrained ethyl modified thymine with phosphorothioate linkage
  modified_base 14: mod_base = OTHER; note = 2'-O-methoxyethyl modified nucleotide with phosphorothioate linkage
  modified_base 15: mod_base = OTHER; note = 2'-O-methoxyethyl modified nucleotide with phosphorothioate linkage
  modified_base 16: mod_base = OTHER; note = Constrained ethyl modified 5-methyl cytosine
ctttcataatgctggc

SEQ ID NO: 263 - DNA, 19 bp, synthetic construct
  source 1..19: mol_type = other DNA
  modified_base 1: mod_base = OTHER; note = 2'-O-methoxyethyl modified thymine with phosphorothioate linkage
  modified_base 2: mod_base = OTHER; note = 2'-O-methoxyethyl modified 5-methyl cytosine with phosphorothioate linkage
  modified_base 3: mod_base = OTHER; note = 2'-O-methoxyethyl modified nucleotide with phosphorothioate linkage
  modified_base 4: mod_base = OTHER; note = 2'-O-methoxyethyl modified 5-methyl cytosine with phosphorothioate linkage
  modified_base 5: mod_base = OTHER; note = 2'-O-methoxyethyl modified thymine with phosphorothioate linkage
  modified_base 6: mod_base = OTHER; note = 2'-O-methoxyethyl modified thymine with phosphorothioate linkage
  modified_base 7: mod_base = OTHER; note = 2'-O-methoxyethyl modified thymine with phosphorothioate linkage
  modified_base 8: mod_base = OTHER; note = 2'-O-methoxyethyl modified 5-methyl cytosine with phosphorothioate linkage
  modified_base 9: mod_base = OTHER; note = 2'-O-methoxyethyl modified nucleotide with phosphorothioate linkage
  modified_base 10: mod_base = OTHER; note = 2'-O-methoxyethyl modified thymine with phosphorothioate linkage
  modified_base 11: mod_base = OTHER; note = 2'-O-methoxyethyl modified nucleotide with phosphorothioate linkage
  modified_base 12: mod_base = OTHER; note = 2'-O-methoxyethyl modified nucleotide with phosphorothioate linkage
  modified_base 13: mod_base = OTHER; note = 2'-O-methoxyethyl modified thymine with phosphorothioate linkage
  modified_base 14: mod_base = OTHER; note = 2'-O-methoxyethyl modified nucleotide with phosphorothioate linkage
  modified_base 15: mod_base = OTHER; note = 2'-O-methoxyethyl modified 5-methyl cytosine with phosphorothioate linkage
  modified_base 16: mod_base = OTHER; note = 2'-O-methoxyethyl modified thymine with phosphorothioate linkage
  modified_base 17: mod_base = OTHER; note = 2'-O-methoxyethyl modified nucleotide with phosphorothioate linkage
  modified_base 18: mod_base = OTHER; note = 2'-O-methoxyethyl modified nucleotide
  modified_base 19: mod_base = OTHER; note = 5-methyl cytosine
  misc_feature 1..18: note = RNA
  misc_feature 19: note = DNA
tcactttcataatgctggc

SEQ ID NO: 264 - DNA, 19 bp, synthetic construct
  source 1..19: mol_type = other DNA
  modified_base 1: mod_base = OTHER; note = 2'-O-methoxyethyl modified thymine with phosphorothioate linkage
  modified_base 2: mod_base = OTHER; note = 2'-O-methoxyethyl modified 5-methyl cytosine with phosphorothioate linkage
  modified_base 3: mod_base = OTHER; note = 2'-O-methoxyethyl modified nucleotide with phosphorothioate linkage
  modified_base 4: mod_base = OTHER; note = 2'-O-methoxyethyl modified 5-methyl cytosine with phosphorothioate linkage
  modified_base 5: mod_base = OTHER; note = 2'-O-methoxyethyl modified thymine with phosphorothioate linkage
  modified_base 6: mod_base = OTHER; note = 2'-O-methoxyethyl modified thymine with phosphorothioate linkage
  modified_base 7: mod_base = OTHER; note = 2'-O-methoxyethyl modified thymine with phosphorothioate linkage
  modified_base 8: mod_base = OTHER; note = 2'-O-methoxyethyl modified 5-methyl cytosine with phosphorothioate linkage
  modified_base 9: mod_base = OTHER; note = 2'-O-methoxyethyl modified nucleotide with phosphorothioate linkage
  modified_base 10: mod_base = OTHER; note = 2'-O-methoxyethyl modified thymine with phosphorothioate linkage
  modified_base 11: mod_base = OTHER; note = 2'-O-methoxyethyl modified nucleotide with phosphorothioate linkage
  modified_base 12: mod_base = OTHER; note = 2'-O-methoxyethyl modified nucleotide with phosphorothioate linkage
  modified_base 13: mod_base = OTHER; note = 2'-O-methoxyethyl modified thymine with phosphorothioate linkage
  modified_base 14: mod_base = OTHER; note = 2'-O-methoxyethyl modified nucleotide with phosphorothioate linkage
  modified_base 15: mod_base = OTHER; note = 2'-O-methoxyethyl modified 5-methyl cytosine with phosphorothioate linkage
  modified_base 16: mod_base = OTHER; note = 2'-O-methoxyethyl modified thymine with phosphorothioate linkage
  modified_base 17: mod_base = OTHER; note = 2'-O-methoxyethyl modified nucleotide with phosphorothioate linkage
  modified_base 18: mod_base = OTHER; note = 2'-O-methoxyethyl modified nucleotide
  misc_feature 1..18: note = RNA
  misc_feature 19: note = DNA
tcactttcataatgctggc

SEQ ID NO: 265 - DNA, 19 bp, synthetic construct
  source 1..19: mol_type = other DNA
  modified_base 1: mod_base = OTHER; note = 2'-O-methoxyethyl modified thymine with phosphorothioate linkage
  modified_base 2: mod_base = OTHER; note = 2'-O-methoxyethyl modified 5-methyl cytosine with phosphorothioate linkage
  modified_base 3: mod_base = OTHER; note = 2'-O-methoxyethyl modified nucleotide with phosphorothioate linkage
  modified_base 4: mod_base = OTHER; note = 2'-O-methoxyethyl modified 5-methyl cytosine with phosphorothioate linkage
  modified_base 5: mod_base = OTHER; note = 2'-O-methoxyethyl modified thymine with phosphorothioate linkage
  modified_base 6: mod_base = OTHER; note = 2'-O-methoxyethyl modified thymine with phosphorothioate linkage
  modified_base 7: mod_base = OTHER; note = 2'-O-methoxyethyl modified thymine with phosphorothioate linkage
  modified_base 8: mod_base = OTHER; note = 2'-O-methoxyethyl modified 5-methyl cytosine with phosphorothioate linkage
  modified_base 9: mod_base = OTHER; note = 2'-O-methoxyethyl modified nucleotide with phosphorothioate linkage
  modified_base 10: mod_base = OTHER; note = 2'-O-methoxyethyl modified thymine with phosphorothioate linkage
  modified_base 11: mod_base = OTHER; note = 2'-O-methoxyethyl modified nucleotide with phosphorothioate linkage
  modified_base 12: mod_base = OTHER; note = 2'-O-methoxyethyl modified nucleotide with phosphorothioate linkage
  modified_base 13: mod_base = OTHER; note = 2'-O-methoxyethyl modified thymine with phosphorothioate linkage
  modified_base 14: mod_base = OTHER; note = 2'-O-methoxyethyl modified nucleotide with phosphorothioate linkage
  modified_base 15: mod_base = OTHER; note = 2'-O-methoxyethyl modified 5-methyl cytosine with phosphorothioate linkage
  modified_base 16: mod_base = OTHER; note = 2'-O-methoxyethyl modified thymine with phosphorothioate linkage
  modified_base 17: mod_base = OTHER; note = 2'-O-methoxyethyl modified nucleotide with phosphorothioate linkage
  modified_base 18: mod_base = OTHER; note = 2'-O-methoxyethyl modified nucleotide
  misc_feature 1..18: note = RNA
  misc_feature 19: note = DNA
tcactttcataatgctggt

SEQ ID NO: 266 - DNA, 19 bp, synthetic construct
  source 1..19: mol_type = other DNA
  modified_base 1: mod_base = OTHER; note = 2'-O-methoxyethyl modified thymine with phosphorothioate linkage
  modified_base 2: mod_base = OTHER; note = 2'-O-methoxyethyl modified 5-methyl cytosine with phosphorothioate linkage
  modified_base 3: mod_base = OTHER; note = 2'-O-methoxyethyl modified nucleotide with phosphorothioate linkage
  modified_base 4: mod_base = OTHER; note = 2'-O-methoxyethyl modified 5-methyl cytosine with phosphorothioate linkage
  modified_base 5: mod_base = OTHER; note = 2'-O-methoxyethyl modified thymine with phosphorothioate linkage
  modified_base 6: mod_base = OTHER; note = 2'-O-methoxyethyl modified thymine with phosphorothioate linkage
  modified_base 7: mod_base = OTHER; note = 2'-O-methoxyethyl modified thymine with phosphorothioate linkage
  modified_base 8: mod_base = OTHER; note = 2'-O-methoxyethyl modified 5-methyl cytosine with phosphorothioate linkage
  modified_base 9: mod_base = OTHER; note = 2'-O-methoxyethyl modified nucleotide with phosphorothioate linkage
  modified_base 10: mod_base = OTHER; note = 2'-O-methoxyethyl modified thymine with phosphorothioate linkage
  modified_base 11: mod_base = OTHER; note = 2'-O-methoxyethyl modified nucleotide with phosphorothioate linkage
  modified_base 12: mod_base = OTHER; note = 2'-O-methoxyethyl modified nucleotide with phosphorothioate linkage
  modified_base 13: mod_base = OTHER; note = 2'-O-methoxyethyl modified thymine with phosphorothioate linkage
  modified_base 14: mod_base = OTHER; note = 2'-O-methoxyethyl modified nucleotide with phosphorothioate linkage
  modified_base 15: mod_base = OTHER; note = 2'-O-methoxyethyl modified 5-methyl cytosine with phosphorothioate linkage
  modified_base 16: mod_base = OTHER; note = 2'-O-methoxyethyl modified thymine with phosphorothioate linkage
  modified_base 17: mod_base = OTHER; note = 2'-O-methoxyethyl modified nucleotide with phosphorothioate linkage
  modified_base 18: mod_base = OTHER; note = 2'-O-methoxyethyl modified nucleotide
  misc_feature 1..18: note = RNA
  misc_feature 19: note = DNA
tcactttcataatgctgga

SEQ ID NO: 267 - RNA, 19 nt, synthetic construct
  source 1..19: mol_type = other RNA
  modified_base 1: mod_base = OTHER; note = 2'-O-methoxyethyl modified thymine with phosphorothioate linkage
  modified_base 2: mod_base = OTHER; note = 2'-O-methoxyethyl modified 5-methyl cytosine with phosphorothioate linkage
  modified_base 3: mod_base = OTHER; note = 2'-O-methoxyethyl modified nucleotide with phosphorothioate linkage
  modified_base 4: mod_base = OTHER; note = 2'-O-methoxyethyl modified 5-methyl cytosine with phosphorothioate linkage
  modified_base 5: mod_base = OTHER; note = 2'-O-methoxyethyl modified thymine with phosphorothioate linkage
  modified_base 6: mod_base = OTHER; note = 2'-O-methoxyethyl modified thymine with phosphorothioate linkage
  modified_base 7: mod_base = OTHER; note = 2'-O-methoxyethyl modified thymine with phosphorothioate linkage
  modified_base 8: mod_base = OTHER; note = 2'-O-methoxyethyl modified 5-methyl cytosine with phosphorothioate linkage
  modified_base 9: mod_base = OTHER; note = 2'-O-methoxyethyl modified nucleotide with phosphorothioate linkage
  modified_base 10: mod_base = OTHER; note = 2'-O-methoxyethyl modified thymine with phosphorothioate linkage
  modified_base 11: mod_base = OTHER; note = 2'-O-methoxyethyl modified nucleotide with phosphorothioate linkage
  modified_base 12: mod_base = OTHER; note = 2'-O-methoxyethyl modified nucleotide with phosphorothioate linkage
  modified_base 13: mod_base = OTHER; note = 2'-O-methoxyethyl modified thymine with phosphorothioate linkage
  modified_base 14: mod_base = OTHER; note = 2'-O-methoxyethyl modified nucleotide with phosphorothioate linkage
  modified_base 15: mod_base = OTHER; note = 2'-O-methoxyethyl modified 5-methyl cytosine with phosphorothioate linkage
  modified_base 16: mod_base = OTHER; note = 2'-O-methoxyethyl modified thymine with phosphorothioate linkage
  modified_base 17: mod_base = OTHER; note = 2'-O-methoxyethyl modified nucleotide with phosphorothioate linkage
  modified_base 18: mod_base = OTHER; note = 2'-O-methoxyethyl modified nucleotide
  modified_base 19: mod_base = OTHER; note = 2'-O-methyl modified nucleotide
tcactttcataatgctggc

SEQ ID NO: 268 - RNA, 19 nt, synthetic construct
  source 1..19: mol_type = other RNA
  modified_base 1: mod_base = OTHER; note = 2'-O-methoxyethyl modified thymine with phosphorothioate linkage
  modified_base 2: mod_base = OTHER; note = 2'-O-methoxyethyl modified 5-methyl cytosine with phosphorothioate linkage
  modified_base 3: mod_base = OTHER; note = 2'-O-methoxyethyl modified nucleotide with phosphorothioate linkage
  modified_base 4: mod_base = OTHER; note = 2'-O-methoxyethyl modified 5-methyl cytosine with phosphorothioate linkage
  modified_base 5: mod_base = OTHER; note = 2'-O-methoxyethyl modified thymine with phosphorothioate linkage
  modified_base 6: mod_base = OTHER; note = 2'-O-methoxyethyl modified thymine with phosphorothioate linkage
  modified_base 7: mod_base = OTHER; note = 2'-O-methoxyethyl modified thymine with phosphorothioate linkage
  modified_base 8: mod_base = OTHER; note = 2'-O-methoxyethyl modified 5-methyl cytosine with phosphorothioate linkage
  modified_base 9: mod_base = OTHER; note = 2'-O-methoxyethyl modified nucleotide with phosphorothioate linkage
  modified_base 10: mod_base = OTHER; note = 2'-O-methoxyethyl modified thymine with phosphorothioate linkage
  modified_base 11: mod_base = OTHER; note = 2'-O-methoxyethyl modified nucleotide with phosphorothioate linkage
  modified_base 12: mod_base = OTHER; note = 2'-O-methoxyethyl modified nucleotide with phosphorothioate linkage
  modified_base 13: mod_base = OTHER; note = 2'-O-methoxyethyl modified thymine with phosphorothioate linkage
  modified_base 14: mod_base = OTHER; note = 2'-O-methoxyethyl modified nucleotide with phosphorothioate linkage
  modified_base 15: mod_base = OTHER; note = 2'-O-methoxyethyl modified 5-methyl cytosine with phosphorothioate linkage
  modified_base 16: mod_base = OTHER; note = 2'-O-methoxyethyl modified thymine with phosphorothioate linkage
  modified_base 17: mod_base = OTHER; note = 2'-O-methoxyethyl modified nucleotide with phosphorothioate linkage
  modified_base 18: mod_base = OTHER; note = 2'-O-methoxyethyl modified nucleotide
  modified_base 19: mod_base = OTHER; note = 2'-O-methyl modified nucleotide
tcactttcataatgctgga

SEQ ID NO: 269 - RNA, 19 nt, synthetic construct
  source 1..19: mol_type = other RNA
  modified_base 1: mod_base = OTHER; note = 2'-O-N-methyl acetamide modified thymine with phosphorothioate linkage
  modified_base 2: mod_base = OTHER; note = 2'-O-N-methyl acetamide modified 5-methyl cytosine with phosphorothioate linkage
  modified_base 3: mod_base = OTHER; note = 2'-O-N-methyl acetamide modified nucleotide with phosphorothioate linkage
  modified_base 4: mod_base = OTHER; note = 2'-O-N-methyl acetamide modified 5-methyl cytosine with phosphorothioate linkage
  modified_base 5: mod_base = OTHER; note = 2'-O-N-methyl acetamide modified thymine with phosphorothioate linkage
  modified_base 6: mod_base = OTHER; note = 2'-O-N-methyl acetamide modified thymine with phosphorothioate linkage
  modified_base 7: mod_base = OTHER; note = 2'-O-N-methyl acetamide modified thymine with phosphorothioate linkage
  modified_base 8: mod_base = OTHER; note = 2'-O-N-methyl acetamide modified 5-methyl cytosine with phosphorothioate linkage
  modified_base 9: mod_base = OTHER; note = 2'-O-N-methyl acetamide modified nucleotide with phosphorothioate linkage
  modified_base 10: mod_base = OTHER; note = 2'-O-N-methyl acetamide modified thymine with phosphorothioate linkage
  modified_base 11: mod_base = OTHER; note = 2'-O-N-methyl acetamide modified nucleotide with phosphorothioate linkage
  modified_base 12: mod_base = OTHER; note = 2'-O-N-methyl acetamide modified nucleotide with phosphorothioate linkage
  modified_base 13: mod_base = OTHER; note = 2'-O-N-methyl acetamide modified thymine with phosphorothioate linkage
  modified_base 14: mod_base = OTHER; note = 2'-O-N-methyl acetamide modified nucleotide with phosphorothioate linkage
  modified_base 15: mod_base = OTHER; note = 2'-O-N-methyl acetamide modified 5-methyl cytosine with phosphorothioate linkage
  modified_base 16: mod_base = OTHER; note = 2'-O-N-methyl acetamide modified thymine with phosphorothioate linkage
  modified_base 17: mod_base = OTHER; note = 2'-O-N-methyl acetamide modified nucleotide with phosphorothioate linkage
  modified_base 18: mod_base = OTHER; note = 2'-O-N-methyl acetamide modified nucleotide
  modified_base 19: mod_base = OTHER; note = 2'-O-methoxyethyl modified 5-methyl cytosine
tcactttcataatgctggc

SEQ ID NO: 270 - RNA, 19 nt, synthetic construct
  source 1..19: mol_type = other RNA
  modified_base 1: mod_base = OTHER; note = 2'-O-N-methyl acetamide modified thymine with phosphorothioate linkage
  modified_base 2: mod_base = OTHER; note = 2'-O-N-methyl acetamide modified 5-methyl cytosine with phosphorothioate linkage
  modified_base 3: mod_base = OTHER; note = 2'-O-N-methyl acetamide modified nucleotide with phosphorothioate linkage
  modified_base 4: mod_base = OTHER; note = 2'-O-N-methyl acetamide modified 5-methyl cytosine with phosphorothioate linkage
  modified_base 5: mod_base = OTHER; note = 2'-O-N-methyl acetamide modified thymine with phosphorothioate linkage
  modified_base 6: mod_base = OTHER; note = 2'-O-N-methyl acetamide modified thymine with phosphorothioate linkage
  modified_base 7: mod_base = OTHER; note = 2'-O-N-methyl acetamide modified thymine with phosphorothioate linkage
  modified_base 8: mod_base = OTHER; note = 2'-O-N-methyl acetamide modified 5-methyl cytosine with phosphorothioate linkage
  modified_base 9: mod_base = OTHER; note = 2'-O-N-methyl acetamide modified nucleotide with phosphorothioate linkage
  modified_base 10: mod_base = OTHER; note = 2'-O-N-methyl acetamide modified thymine with phosphorothioate linkage
  modified_base 11: mod_base = OTHER; note = 2'-O-N-methyl acetamide modified nucleotide with phosphorothioate linkage
  modified_base 12: mod_base = OTHER; note = 2'-O-N-methyl acetamide modified nucleotide with phosphorothioate linkage
  modified_base 13: mod_base = OTHER; note = 2'-O-N-methyl acetamide modified thymine with phosphorothioate linkage
  modified_base 14: mod_base = OTHER; note = 2'-O-N-methyl acetamide modified nucleotide with phosphorothioate linkage
  modified_base 15: mod_base = OTHER; note = 2'-O-N-methyl acetamide modified 5-methyl cytosine with phosphorothioate linkage
  modified_base 16: mod_base = OTHER; note = 2'-O-N-methyl acetamide modified thymine with phosphorothioate linkage
  modified_base 17: mod_base = OTHER; note = 2'-O-N-methyl acetamide modified nucleotide with phosphorothioate linkage
  modified_base 18: mod_base = OTHER; note = 2'-O-N-methyl acetamide modified nucleotide
  modified_base 19: mod_base = OTHER; note = 2'-O-methoxyethyl modified nucleotide
tcactttcataatgctggc

SEQ ID NO: 271 - RNA, 19 nt, synthetic construct
  source 1..19: mol_type = other RNA
  modified_base 1: mod_base = OTHER; note = 2'-O-N-methyl acetamide modified thymine with phosphorothioate linkage
  modified_base 2: mod_base = OTHER; note = 2'-O-N-methyl acetamide modified 5-methyl cytosine with phosphorothioate linkage
  modified_base 3: mod_base = OTHER; note = 2'-O-N-methyl acetamide modified nucleotide with phosphorothioate linkage
  modified_base 4: mod_base = OTHER; note = 2'-O-N-methyl acetamide modified 5-methyl cytosine with phosphorothioate linkage
  modified_base 5: mod_base = OTHER; note = 2'-O-N-methyl acetamide modified thymine with phosphorothioate linkage
  modified_base 6: mod_base = OTHER; note = 2'-O-N-methyl acetamide modified thymine with phosphorothioate linkage
  modified_base 7: mod_base = OTHER; note = 2'-O-N-methyl acetamide modified thymine with phosphorothioate linkage
  modified_base 8: mod_base = OTHER; note = 2'-O-N-methyl acetamide modified 5-methyl cytosine with phosphorothioate linkage
  modified_base 9: mod_base = OTHER; note = 2'-O-N-methyl acetamide modified nucleotide with phosphorothioate linkage
  modified_base 10: mod_base = OTHER; note = 2'-O-N-methyl acetamide modified thymine with phosphorothioate linkage
  modified_base 11: mod_base = OTHER; note = 2'-O-N-methyl acetamide modified nucleotide with phosphorothioate linkage
  modified_base 12: mod_base = OTHER; note = 2'-O-N-methyl acetamide modified nucleotide with phosphorothioate linkage
  modified_base 13: mod_base = OTHER; note = 2'-O-N-methyl acetamide modified thymine with phosphorothioate linkage
  modified_base 14: mod_base = OTHER; note = 2'-O-N-methyl acetamide modified nucleotide with phosphorothioate linkage
  modified_base 15: mod_base = OTHER; note = 2'-O-N-methyl acetamide modified 5-methyl cytosine with phosphorothioate linkage
  modified_base 16: mod_base = OTHER; note = 2'-O-N-methyl acetamide modified thymine with phosphorothioate linkage
  modified_base 17: mod_base = OTHER; note = 2'-O-N-methyl acetamide modified nucleotide with phosphorothioate linkage
  modified_base 18: mod_base = OTHER; note = 2'-O-N-methyl acetamide modified nucleotide
  modified_base 19: mod_base = OTHER; note = 2'-O-methoxyethyl modified thymine
tcactttcataatgctggt

SEQ ID NO: 272 - RNA, 19 nt, synthetic construct
  source 1..19: mol_type = other RNA
  modified_base 1: mod_base = OTHER; note = 2'-O-N-methyl acetamide modified thymine with phosphorothioate linkage
  modified_base 2: mod_base = OTHER; note = 2'-O-N-methyl acetamide modified 5-methyl cytosine with phosphorothioate linkage
  modified_base 3: mod_base = OTHER; note = 2'-O-N-methyl acetamide modified nucleotide with phosphorothioate linkage
  modified_base 4: mod_base = OTHER; note = 2'-O-N-methyl acetamide modified 5-methyl cytosine with phosphorothioate linkage
  modified_base 5: mod_base = OTHER; note = 2'-O-N-methyl acetamide modified thymine with phosphorothioate linkage
  modified_base 6: mod_base = OTHER; note = 2'-O-N-methyl acetamide modified thymine with phosphorothioate linkage
  modified_base 7: mod_base = OTHER; note = 2'-O-N-methyl acetamide modified thymine with phosphorothioate linkage
  modified_base 8: mod_base = OTHER; note = 2'-O-N-methyl acetamide modified 5-methyl cytosine with phosphorothioate linkage
  modified_base 9: mod_base = OTHER; note = 2'-O-N-methyl acetamide modified nucleotide with phosphorothioate linkage
  modified_base 10: mod_base = OTHER; note = 2'-O-N-methyl acetamide modified thymine with phosphorothioate linkage
  modified_base 11: mod_base = OTHER; note = 2'-O-N-methyl acetamide modified nucleotide with phosphorothioate linkage
  modified_base 12: mod_base = OTHER; note = 2'-O-N-methyl acetamide modified nucleotide with phosphorothioate linkage
  modified_base 13: mod_base = OTHER; note = 2'-O-N-methyl acetamide modified thymine with phosphorothioate linkage
  modified_base 14: mod_base = OTHER; note = 2'-O-N-methyl acetamide modified nucleotide with phosphorothioate linkage
  modified_base 15: mod_base = OTHER; note = 2'-O-N-methyl acetamide modified 5-methyl cytosine with phosphorothioate linkage
  modified_base 16: mod_base = OTHER; note = 2'-O-N-methyl acetamide modified thymine with phosphorothioate linkage
  modified_base 17: mod_base = OTHER; note = 2'-O-N-methyl acetamide modified nucleotide with phosphorothioate linkage
  modified_base 18: mod_base = OTHER; note = 2'-O-N-methyl acetamide modified nucleotide
  modified_base 19: mod_base = OTHER; note = 2'-O-methoxyethyl modified nucleotide
tcactttcataatgctgga

SEQ ID NO: 273 - DNA, 19 bp, synthetic construct
  source 1..19: mol_type = other DNA
  modified_base 1: mod_base = OTHER; note = 2'-O-N-methyl acetamide modified thymine with phosphorothioate linkage
  modified_base 2: mod_base = OTHER; note = 2'-O-N-methyl acetamide modified 5-methyl cytosine with phosphorothioate linkage
  modified_base 3: mod_base = OTHER; note = 2'-O-N-methyl acetamide modified nucleotide with phosphorothioate linkage
  modified_base 4: mod_base = OTHER; note = 2'-O-N-methyl acetamide modified 5-methyl cytosine with phosphorothioate linkage
  modified_base 5: mod_base = OTHER; note = 2'-O-N-methyl acetamide modified thymine with phosphorothioate linkage
  modified_base 6: mod_base = OTHER; note = 2'-O-N-methyl acetamide modified thymine with phosphorothioate linkage
  modified_base 7: mod_base = OTHER; note = 2'-O-N-methyl acetamide modified thymine with phosphorothioate linkage
  modified_base 8: mod_base = OTHER; note = 2'-O-N-methyl acetamide modified 5-methyl cytosine with phosphorothioate linkage
  modified_base 9: mod_base = OTHER; note = 2'-O-N-methyl acetamide modified nucleotide with phosphorothioate linkage
  modified_base 10: mod_base = OTHER; note = 2'-O-N-methyl acetamide modified thymine with phosphorothioate linkage
  modified_base 11: mod_base = OTHER; note = 2'-O-N-methyl acetamide modified nucleotide with phosphorothioate linkage
  modified_base 12: mod_base = OTHER; note = 2'-O-N-methyl acetamide modified nucleotide with phosphorothioate linkage
  modified_base 13: mod_base = OTHER; note = 2'-O-N-methyl acetamide modified thymine with phosphorothioate linkage
  modified_base 14: mod_base = OTHER; note = 2'-O-N-methyl acetamide modified nucleotide with phosphorothioate linkage
  modified_base 15: mod_base = OTHER; note = 2'-O-N-methyl acetamide modified 5-methyl cytosine with phosphorothioate linkage
  modified_base 16: mod_base = OTHER; note = 2'-O-N-methyl acetamide modified thymine with phosphorothioate linkage
  modified_base 17: mod_base = OTHER; note = 2'-O-N-methyl acetamide modified nucleotide with phosphorothioate linkage
  modified_base 18: mod_base = OTHER; note = 2'-O-N-methyl acetamide modified nucleotide
  modified_base 19: mod_base = OTHER; note = 5-methyl cytosine
  misc_feature 1..18: note = RNA
  misc_feature 19: note = DNA
tcactttcataatgctggc

SEQ ID NO: 274 - DNA, 19 bp, synthetic construct
  source 1..19: mol_type = other DNA
  modified_base 1: mod_base = OTHER; note = 2'-O-N-methyl acetamide modified thymine with phosphorothioate linkage
  modified_base 2: mod_base = OTHER; note = 2'-O-N-methyl acetamide modified 5-methyl cytosine with phosphorothioate linkage
  modified_base 3: mod_base = OTHER; note = 2'-O-N-methyl acetamide modified nucleotide with phosphorothioate linkage
  modified_base 4: mod_base = OTHER; note = 2'-O-N-methyl acetamide modified 5-methyl cytosine with phosphorothioate linkage
  modified_base 5: mod_base = OTHER; note = 2'-O-N-methyl acetamide modified thymine with phosphorothioate linkage
  modified_base 6: mod_base = OTHER; note = 2'-O-N-methyl acetamide modified thymine with phosphorothioate linkage
  modified_base 7: mod_base = OTHER; note = 2'-O-N-methyl acetamide modified thymine with phosphorothioate linkage
  modified_base 8: mod_base = OTHER; note = 2'-O-N-methyl acetamide modified 5-methyl cytosine with phosphorothioate linkage
  modified_base 9: mod_base = OTHER; note = 2'-O-N-methyl acetamide modified nucleotide with phosphorothioate linkage
  modified_base 10: mod_base = OTHER; note = 2'-O-N-methyl acetamide modified thymine with phosphorothioate linkage
  modified_base 11: mod_base = OTHER; note = 2'-O-N-methyl acetamide modified nucleotide with phosphorothioate linkage
  modified_base 12: mod_base = OTHER; note = 2'-O-N-methyl acetamide modified nucleotide with phosphorothioate linkage
  modified_base 13: mod_base = OTHER; note = 2'-O-N-methyl acetamide modified thymine with phosphorothioate linkage
  modified_base 14: mod_base = OTHER; note = 2'-O-N-methyl acetamide modified nucleotide with phosphorothioate linkage
  modified_base 15: mod_base = OTHER; note = 2'-O-N-methyl acetamide modified 5-methyl cytosine with phosphorothioate linkage
  modified_base 16: mod_base = OTHER; note = 2'-O-N-methyl acetamide modified thymine with phosphorothioate linkage
  modified_base 17: mod_base = OTHER; note = 2'-O-N-methyl acetamide modified nucleotide with phosphorothioate linkage
  modified_base 18: mod_base = OTHER; note = 2'-O-N-methyl acetamide modified nucleotide
  misc_feature 1..18: note = RNA
  misc_feature 19: note = DNA
tcactttcataatgctggc

SEQ ID NO: 275 - DNA, 19 bp, synthetic construct
  source 1..19: mol_type = other DNA
  modified_base 1: mod_base = OTHER; note = 2'-O-N-methyl acetamide modified thymine with phosphorothioate linkage
  modified_base 2: mod_base = OTHER; note = 2'-O-N-methyl acetamide modified 5-methyl cytosine with phosphorothioate linkage
  modified_base 3: mod_base = OTHER; note = 2'-O-N-methyl acetamide modified nucleotide with phosphorothioate linkage
  modified_base 4: mod_base = OTHER; note = 2'-O-N-methyl acetamide modified 5-methyl cytosine with phosphorothioate linkage
  modified_base 5: mod_base = OTHER; note = 2'-O-N-methyl acetamide modified thymine with phosphorothioate linkage
  modified_base 6: mod_base = OTHER; note = 2'-O-N-methyl acetamide modified thymine with phosphorothioate linkage
  modified_base 7: mod_base = OTHER; note = 2'-O-N-methyl acetamide modified thymine with phosphorothioate linkage
  modified_base 8: mod_base = OTHER; note = 2'-O-N-methyl acetamide modified 5-methyl cytosine with phosphorothioate linkage
  modified_base 9: mod_base = OTHER; note = 2'-O-N-methyl acetamide modified nucleotide with phosphorothioate linkage
  modified_base 10: mod_base = OTHER; note = 2'-O-N-methyl acetamide modified thymine with phosphorothioate linkage
  modified_base 11: mod_base = OTHER; note = 2'-O-N-methyl acetamide modified nucleotide with phosphorothioate linkage
  modified_base 12: mod_base = OTHER; note = 2'-O-N-methyl acetamide modified nucleotide with phosphorothioate linkage
  modified_base 13: mod_base = OTHER; note = 2'-O-N-methyl acetamide modified thymine with phosphorothioate linkage
  modified_base 14: mod_base = OTHER; note = 2'-O-N-methyl acetamide modified nucleotide with phosphorothioate linkage
  modified_base 15: mod_base = OTHER; note = 2'-O-N-methyl acetamide modified 5-methyl cytosine with phosphorothioate linkage
  modified_base 16: mod_base = OTHER; note = 2'-O-N-methyl acetamide modified thymine with phosphorothioate linkage
  modified_base 17: mod_base = OTHER; note = 2'-O-N-methyl acetamide modified nucleotide with phosphorothioate linkage
  modified_base 18: mod_base = OTHER; note = 2'-O-N-methyl acetamide modified nucleotide
  misc_feature 1..18: note = RNA
  misc_feature 19: note = DNA
tcactttcataatgctggt

SEQ ID NO: 276 - DNA, 19 bp, synthetic construct
  source 1..19: mol_type = other DNA
  modified_base 1: mod_base = OTHER; note = 2'-O-N-methyl acetamide modified thymine with phosphorothioate linkage
  modified_base 2: mod_base = OTHER; note = 2'-O-N-methyl acetamide modified 5-methyl cytosine with phosphorothioate linkage
  modified_base 3: mod_base = OTHER; note = 2'-O-N-methyl acetamide modified nucleotide with phosphorothioate linkage
  modified_base 4: mod_base = OTHER; note = 2'-O-N-methyl acetamide modified 5-methyl cytosine with phosphorothioate linkage
  modified_base 5: mod_base = OTHER; note = 2'-O-N-methyl acetamide modified thymine with phosphorothioate linkage
  modified_base 6: mod_base = OTHER; note = 2'-O-N-methyl acetamide modified thymine with phosphorothioate linkage
  modified_base 7: mod_base = OTHER; note = 2'-O-N-methyl acetamide modified thymine with phosphorothioate linkage
  modified_base 8: mod_base = OTHER; note = 2'-O-N-methyl acetamide modified 5-methyl cytosine with phosphorothioate linkage
  modified_base 9: mod_base = OTHER; note = 2'-O-N-methyl acetamide modified nucleotide with phosphorothioate linkage
  modified_base 10: mod_base = OTHER; note = 2'-O-N-methyl acetamide modified thymine with phosphorothioate linkage
  modified_base 11: mod_base = OTHER; note = 2'-O-N-methyl acetamide modified nucleotide with phosphorothioate linkage
  modified_base 12: mod_base = OTHER; note = 2'-O-N-methyl acetamide modified nucleotide with phosphorothioate linkage
  modified_base 13: mod_base = OTHER; note = 2'-O-N-methyl acetamide modified thymine with phosphorothioate linkage
  modified_base 14: mod_base = OTHER; note = 2'-O-N-methyl acetamide modified nucleotide with phosphorothioate linkage
  modified_base 15: mod_base = OTHER; note = 2'-O-N-methyl acetamide modified 5-methyl cytosine with phosphorothioate linkage
  modified_base 16: mod_base = OTHER; note = 2'-O-N-methyl acetamide modified thymine with phosphorothioate linkage
  modified_base 17: mod_base = OTHER; note = 2'-O-N-methyl acetamide modified nucleotide with phosphorothioate linkage
  modified_base 18: mod_base = OTHER; note = 2'-O-N-methyl acetamide modified nucleotide
  misc_feature 1..18: note = RNA
  misc_feature 19: note = DNA
tcactttcataatgctgga

SEQ ID NO: 277 - RNA, 19 nt, synthetic construct
  source 1..19: mol_type = other RNA
  modified_base 1: mod_base = OTHER; note = 2'-O-N-methyl acetamide modified thymine with phosphorothioate linkage
  modified_base 2: mod_base = OTHER; note = 2'-O-N-methyl acetamide modified 5-methyl cytosine with phosphorothioate linkage
  modified_base 3: mod_base = OTHER; note = 2'-O-N-methyl acetamide modified nucleotide with phosphorothioate linkage
  modified_base 4: mod_base = OTHER; note = 2'-O-N-methyl acetamide modified 5-methyl cytosine with phosphorothioate linkage
  modified_base 5: mod_base = OTHER; note = 2'-O-N-methyl acetamide modified thymine with phosphorothioate linkage
  modified_base 6: mod_base = OTHER; note = 2'-O-N-methyl acetamide modified thymine with phosphorothioate linkage
  modified_base 7: mod_base = OTHER; note = 2'-O-N-methyl acetamide modified thymine with phosphorothioate linkage
  modified_base 8: mod_base = OTHER; note = 2'-O-N-methyl acetamide modified 5-methyl cytosine with phosphorothioate linkage
  modified_base 9: mod_base = OTHER; note = 2'-O-N-methyl acetamide modified nucleotide with phosphorothioate linkage
  modified_base 10: mod_base = OTHER; note = 2'-O-N-methyl acetamide modified thymine with phosphorothioate linkage
  modified_base 11: mod_base = OTHER; note = 2'-O-N-methyl acetamide modified nucleotide with phosphorothioate linkage
  modified_base 12: mod_base = OTHER; note = 2'-O-N-methyl acetamide modified nucleotide with phosphorothioate linkage
  modified_base 13: mod_base = OTHER; note = 2'-O-N-methyl acetamide modified thymine with phosphorothioate linkage
  modified_base 14: mod_base = OTHER; note = 2'-O-N-methyl acetamide modified nucleotide with phosphorothioate linkage
  modified_base 15: mod_base = OTHER; note = 2'-O-N-methyl acetamide modified 5-methyl cytosine with phosphorothioate linkage
  modified_base 16: mod_base = OTHER; note = 2'-O-N-methyl acetamide modified thymine with phosphorothioate linkage
  modified_base 17: mod_base = OTHER; note = 2'-O-N-methyl acetamide modified nucleotide with phosphorothioate linkage
  modified_base 18: mod_base = OTHER; note = 2'-O-N-methyl acetamide modified nucleotide
  modified_base 19: mod_base = OTHER; note = 2'-O-methyl modified nucleotide
tcactttcataatgctggc

SEQ ID NO: 278 - RNA, 19 nt, synthetic construct
  source 1..19: mol_type = other RNA
  modified_base 1: mod_base = OTHER; note = 2'-O-N-methyl acetamide modified thymine with phosphorothioate linkage
  modified_base 2: mod_base = OTHER; note = 2'-O-N-methyl acetamide modified 5-methyl cytosine with phosphorothioate linkage
  modified_base 3: mod_base = OTHER; note = 2'-O-N-methyl acetamide modified nucleotide with phosphorothioate linkage
  modified_base 4: mod_base = OTHER; note = 2'-O-N-methyl acetamide modified 5-methyl cytosine with phosphorothioate linkage
  modified_base 5: mod_base = OTHER; note = 2'-O-N-methyl acetamide modified thymine with phosphorothioate linkage
  modified_base 6: mod_base = OTHER; note = 2'-O-N-methyl acetamide modified thymine with phosphorothioate linkage
  modified_base 7: mod_base = OTHER; note = 2'-O-N-methyl acetamide modified thymine with phosphorothioate linkage
  modified_base 8: mod_base = OTHER; note = 2'-O-N-methyl acetamide modified 5-methyl cytosine with phosphorothioate linkage
  modified_base 9: mod_base = OTHER; note = 2'-O-N-methyl acetamide modified nucleotide with phosphorothioate linkage
  modified_base 10: mod_base = OTHER; note = 2'-O-N-methyl acetamide modified thymine with phosphorothioate linkage
  modified_base 11: mod_base = OTHER; note = 2'-O-N-methyl acetamide modified nucleotide with phosphorothioate linkage
  modified_base 12: mod_base = OTHER; note = 2'-O-N-methyl acetamide modified nucleotide with phosphorothioate linkage
  modified_base 13: mod_base = OTHER; note = 2'-O-N-methyl acetamide modified thymine with phosphorothioate linkage
  modified_base 14: mod_base = OTHER; note = 2'-O-N-methyl acetamide modified nucleotide with phosphorothioate linkage
  modified_base 15: mod_base = OTHER; note = 2'-O-N-methyl acetamide modified 5-methyl cytosine with phosphorothioate linkage
  modified_base 16: mod_base = OTHER; note = 2'-O-N-methyl acetamide modified thymine with phosphorothioate linkage
  modified_base 17: mod_base = OTHER; note = 2'-O-N-methyl acetamide modified nucleotide with phosphorothioate linkage
  modified_base 18: mod_base = OTHER; note = 2'-O-N-methyl acetamide modified nucleotide
  modified_base 19: mod_base = OTHER; note = 2'-O-methyl modified nucleotide
tcactttcataatgctggt

SEQ ID NO: 279 - RNA, 19 nt, synthetic construct
  source 1..19: mol_type = other RNA
  modified_base 1: mod_base = OTHER; note = 2'-O-N-methyl acetamide modified thymine with phosphorothioate linkage
  modified_base 2: mod_base = OTHER; note = 2'-O-N-methyl acetamide modified 5-methyl cytosine with phosphorothioate linkage
  modified_base 3: mod_base = OTHER; note = 2'-O-N-methyl acetamide modified nucleotide with phosphorothioate linkage
  modified_base 4: mod_base = OTHER; note = 2'-O-N-methyl acetamide modified 5-methyl cytosine with phosphorothioate linkage
  modified_base 5: mod_base = OTHER; note = 2'-O-N-methyl acetamide modified thymine with phosphorothioate linkage
  modified_base 6: mod_base = OTHER; note = 2'-O-N-methyl acetamide modified thymine with phosphorothioate linkage
  modified_base 7: mod_base = OTHER; note = 2'-O-N-methyl acetamide modified thymine with phosphorothioate linkage
  modified_base 8: mod_base = OTHER; note = 2'-O-N-methyl acetamide modified 5-methyl cytosine with phosphorothioate linkage
  modified_base 9: mod_base = OTHER; note = 2'-O-N-methyl acetamide modified nucleotide with phosphorothioate linkage
  modified_base 10: mod_base = OTHER; note = 2'-O-N-methyl acetamide modified thymine with phosphorothioate linkage
  modified_base 11: mod_base = OTHER; note = 2'-O-N-methyl acetamide modified nucleotide with phosphorothioate linkage
  modified_base 12: mod_base = OTHER; note = 2'-O-N-methyl acetamide modified nucleotide with phosphorothioate linkage
  modified_base 13: mod_base = OTHER; note = 2'-O-N-methyl acetamide modified thymine with phosphorothioate linkage
  modified_base 14: mod_base = OTHER; note = 2'-O-N-methyl acetamide modified nucleotide with phosphorothioate linkage
  modified_base 15: mod_base = OTHER; note = 2'-O-N-methyl acetamide modified 5-methyl cytosine with phosphorothioate linkage
  modified_base 16: mod_base = OTHER; note = 2'-O-N-methyl acetamide modified thymine with phosphorothioate linkage
  modified_base 17: mod_base = OTHER; note = 2'-O-N-methyl acetamide modified nucleotide with phosphorothioate linkage
  modified_base 18: mod_base = OTHER; note = 2'-O-N-methyl acetamide modified nucleotide
  modified_base 19: mod_base = OTHER; note = 2'-O-methyl modified nucleotide
tcactttcataatgctgga

SEQ ID NO: 280 - RNA, 19 nt, synthetic construct
  source 1..19: mol_type = other RNA
  modified_base 1: mod_base = OTHER; note = 2'-O-methoxyethyl modified thymine with phosphorothioate linkage
  modified_base 2: mod_base = OTHER; note = 2'-O-methoxyethyl modified 5-methyl cytosine with phosphorothioate linkage
  modified_base 3: mod_base = OTHER; note = 2'-O-methoxyethyl modified nucleotide with phosphorothioate linkage
  modified_base 4: mod_base = OTHER; note = 2'-O-methoxyethyl modified 5-methyl cytosine with phosphorothioate linkage
  modified_base 5: mod_base = OTHER; note = 2'-O-methoxyethyl modified thymine with phosphorothioate linkage
  modified_base 6: mod_base = OTHER; note = 2'-O-methoxyethyl modified thymine with phosphorothioate linkage
  modified_base 7: mod_base = OTHER; note = 2'-O-methoxyethyl modified thymine with phosphorothioate linkage
  modified_base 8: mod_base = OTHER; note = 2'-O-methoxyethyl modified 5-methyl cytosine with phosphorothioate linkage
  modified_base 9: mod_base = OTHER; note = 2'-O-methoxyethyl modified nucleotide with phosphorothioate linkage
  modified_base 10: mod_base = OTHER; note = 2'-O-methoxyethyl modified thymine with phosphorothioate linkage
  modified_base 11: mod_base = OTHER; note = 2'-O-methoxyethyl modified nucleotide with phosphorothioate linkage
  modified_base 12: mod_base = OTHER; note = 2'-O-methoxyethyl modified nucleotide with phosphorothioate linkage
  modified_base 13: mod_base = OTHER; note = 2'-O-methoxyethyl modified thymine with phosphorothioate linkage
  modified_base 14: mod_base = OTHER; note = 2'-O-methoxyethyl modified nucleotide with phosphorothioate linkage
  modified_base 15: mod_base = OTHER; note = 2'-O-methoxyethyl modified 5-methyl cytosine with phosphorothioate linkage
  modified_base 16: mod_base = OTHER; note = 2'-O-methoxyethyl modified thymine with phosphorothioate linkage
  modified_base 17: mod_base = OTHER; note = 2'-O-methoxyethyl modified nucleotide with phosphorothioate linkage
  modified_base 18: mod_base = OTHER; note = 2'-O-methoxyethyl modified nucleotide
  modified_base 19: mod_base = OTHER; note = 2'-O-methoxyethyl modified thymine
tcactttcataatgctggt

SEQ ID NO: 281 - RNA, 19 nt, synthetic construct
  source 1..19: mol_type = other RNA
  modified_base 1: mod_base = OTHER; note = 2'-O-methoxyethyl modified thymine with phosphorothioate linkage
  modified_base 2: mod_base = OTHER; note = 2'-O-methoxyethyl modified 5-methyl cytosine with phosphorothioate linkage
  modified_base 3: mod_base = OTHER; note = 2'-O-methoxyethyl modified nucleotide with phosphorothioate linkage
  modified_base 4: mod_base = OTHER; note = 2'-O-methoxyethyl modified 5-methyl cytosine with phosphorothioate linkage
  modified_base 5: mod_base = OTHER; note = 2'-O-methoxyethyl modified thymine with phosphorothioate linkage
  modified_base 6: mod_base = OTHER; note = 2'-O-methoxyethyl modified thymine with phosphorothioate linkage
  modified_base 7: mod_base = OTHER; note = 2'-O-methoxyethyl modified thymine with phosphorothioate linkage
  modified_base 8: mod_base = OTHER; note = 2'-O-methoxyethyl modified 5-methyl cytosine with phosphorothioate linkage
  modified_base 9: mod_base = OTHER; note = 2'-O-methoxyethyl modified nucleotide with phosphorothioate linkage
  modified_base 10: mod_base = OTHER; note = 2'-O-methoxyethyl modified thymine with phosphorothioate linkage
  modified_base 11: mod_base = OTHER; note = 2'-O-methoxyethyl modified nucleotide with phosphorothioate linkage
  modified_base 12: mod_base = OTHER; note = 2'-O-methoxyethyl modified nucleotide with phosphorothioate linkage
  modified_base 13: mod_base = OTHER; note = 2'-O-methoxyethyl modified thymine with phosphorothioate linkage
  modified_base 14: mod_base = OTHER; note = 2'-O-methoxyethyl modified nucleotide with phosphorothioate linkage
  modified_base 15: mod_base = OTHER; note = 2'-O-methoxyethyl modified 5-methyl cytosine with phosphorothioate linkage
  modified_base 16: mod_base = OTHER; note = 2'-O-methoxyethyl modified thymine with phosphorothioate linkage
  modified_base 17: mod_base = OTHER; note = 2'-O-methoxyethyl modified nucleotide with phosphorothioate linkage
  modified_base 18: mod_base = OTHER; note = 2'-O-methoxyethyl modified nucleotide
  modified_base 19: mod_base = OTHER; note = 2'-O-methoxyethyl modified nucleotide
tcactttcataatgctgga

SEQ ID NO: 282 - RNA, 19 nt, synthetic construct
  source 1..19: mol_type = other RNA
  modified_base 1: mod_base = OTHER; note = 2'-O-methoxyethyl modified thymine with phosphorothioate linkage
  modified_base 2: mod_base = OTHER; note = 2'-O-methoxyethyl modified 5-methyl cytosine with phosphorothioate linkage
  modified_base 3: mod_base = OTHER; note = 2'-O-methoxyethyl modified nucleotide with phosphorothioate linkage
  modified_base 4: mod_base = OTHER; note = 2'-O-methoxyethyl modified 5-methyl cytosine with phosphorothioate linkage
  modified_base 5: mod_base = OTHER; note = 2'-O-methoxyethyl modified thymine with phosphorothioate linkage
  modified_base 6: mod_base = OTHER; note = 2'-O-methoxyethyl modified thymine with phosphorothioate linkage
  modified_base 7: mod_base = OTHER; note = 2'-O-methoxyethyl modified thymine with phosphorothioate linkage
  modified_base 8: mod_base = OTHER; note = 2'-O-methoxyethyl modified 5-methyl cytosine with phosphorothioate linkage
  modified_base 9: mod_base = OTHER; note = 2'-O-methoxyethyl modified nucleotide with phosphorothioate linkage
  modified_base 10: mod_base = OTHER; note = 2'-O-methoxyethyl modified thymine with phosphorothioate linkage
  modified_base 11: mod_base = OTHER; note = 2'-O-methoxyethyl modified nucleotide with phosphorothioate linkage
  modified_base 12: mod_base = OTHER; note = 2'-O-methoxyethyl modified nucleotide with phosphorothioate linkage
  modified_base 13: mod_base = OTHER; note = 2'-O-methoxyethyl modified thymine with phosphorothioate linkage
  modified_base 14: mod_base = OTHER; note = 2'-O-methoxyethyl modified nucleotide with phosphorothioate linkage
  modified_base 15: mod_base = OTHER; note = 2'-O-methoxyethyl modified 5-methyl cytosine with phosphorothioate linkage
  modified_base 16: mod_base = OTHER; note = 2'-O-methoxyethyl modified thymine with phosphorothioate linkage
  modified_base 17: mod_base = OTHER; note = 2'-O-methoxyethyl modified nucleotide with phosphorothioate linkage
  modified_base 18: mod_base = OTHER; note = 2'-O-methoxyethyl modified nucleotide
  modified_base 19: mod_base = OTHER; note = 2'-O-methoxyethyl modified nucleotide
tcactttcataatgctggc

SEQ ID NO: 283 - RNA, 19 nt, synthetic construct
  source 1..19: mol_type = other RNA
  modified_base 1: mod_base = OTHER; note = 2'-O-methoxyethyl modified thymine with phosphorothioate linkage
  modified_base 2: mod_base = OTHER; note = 2'-O-methoxyethyl modified 5-methyl cytosine with phosphorothioate linkage
  modified_base 3: mod_base = OTHER; note = 2'-O-methoxyethyl modified nucleotide with phosphorothioate linkage
  modified_base 4: mod_base = OTHER; note = 2'-O-methoxyethyl modified 5-methyl cytosine with phosphorothioate linkage
  modified_base 5: mod_base = OTHER; note = 2'-O-methoxyethyl modified thymine with phosphorothioate linkage
  modified_base 6: mod_base = OTHER; note = 2'-O-methoxyethyl modified thymine with phosphorothioate linkage
  modified_base 7: mod_base = OTHER; note = 2'-O-methoxyethyl modified thymine with phosphorothioate linkage
  modified_base 8: mod_base = OTHER; note = 2'-O-methoxyethyl modified 5-methyl cytosine with phosphorothioate linkage
  modified_base 9: mod_base = OTHER; note = 2'-O-methoxyethyl modified nucleotide with phosphorothioate linkage
  modified_base 10: mod_base = OTHER; note = 2'-O-methoxyethyl modified thymine with phosphorothioate linkage
  modified_base 11: mod_base = OTHER; note = 2'-O-methoxyethyl modified nucleotide with phosphorothioate linkage
  modified_base 12: mod_base = OTHER; note = 2'-O-methoxyethyl modified nucleotide with phosphorothioate linkage
  modified_base 13: mod_base = OTHER; note = 2'-O-methoxyethyl modified thymine with phosphorothioate linkage
  modified_base 14: mod_base = OTHER; note = 2'-O-methoxyethyl modified nucleotide with phosphorothioate linkage
  modified_base 15: mod_base = OTHER; note = 2'-O-methoxyethyl modified 5-methyl cytosine with phosphorothioate linkage
  modified_base 16: mod_base = OTHER; note = 2'-O-methoxyethyl modified thymine with phosphorothioate linkage
  modified_base 17: mod_base = OTHER; note = 2'-O-methoxyethyl modified nucleotide with phosphorothioate linkage
  modified_base 18: mod_base = OTHER; note = 2'-O-methoxyethyl modified nucleotide
  modified_base 19: mod_base = OTHER; note = 2'-O-methoxyethyl modified 5-methyl cytosine
tcactttcataatgctggc

SEQ ID NO: 284 - DNA, 20 bp, synthetic construct
  source 1..20: mol_type = other DNA
  modified_base 1: mod_base = OTHER; note = 2'-O-N-methyl acetamide modified thymine with phosphorothioate linkage
  modified_base 2: mod_base = OTHER; note = 2'-O-N-methyl acetamide modified 5-methyl cytosine with phosphorothioate linkage
  modified_base 3: mod_base = OTHER; note = 2'-O-N-methyl acetamide modified nucleotide with phosphorothioate linkage
  modified_base 4: mod_base = OTHER; note = 2'-O-N-methyl acetamide modified 5-methyl cytosine with phosphorothioate linkage
  modified_base 5: mod_base = OTHER; note = 2'-O-N-methyl acetamide modified thymine with phosphorothioate linkage
  modified_base 6: mod_base = OTHER; note = 2'-O-N-methyl acetamide modified thymine with phosphorothioate linkage
  modified_base 7: mod_base = OTHER; note = 2'-O-N-methyl acetamide modified thymine with phosphorothioate linkage
  modified_base 8: mod_base = OTHER; note = 2'-O-N-methyl acetamide modified 5-methyl cytosine with phosphorothioate linkage
  modified_base 9: mod_base = OTHER; note = 2'-O-N-methyl acetamide modified nucleotide with phosphorothioate linkage
  modified_base 10: mod_base = OTHER; note = 2'-O-N-methyl acetamide modified thymine with phosphorothioate linkage
  modified_base 11: mod_base = OTHER; note = 2'-O-N-methyl acetamide modified nucleotide with phosphorothioate linkage
  modified_base 12: mod_base = OTHER; note = 2'-O-N-methyl acetamide modified nucleotide with phosphorothioate linkage
  modified_base 13: mod_base = OTHER; note = 2'-O-N-methyl acetamide modified thymine with phosphorothioate linkage
  modified_base 14: mod_base = OTHER; note = 2'-O-N-methyl acetamide modified nucleotide with phosphorothioate linkage
  modified_base 15: mod_base = OTHER; note = 2'-O-N-methyl acetamide modified 5-methyl cytosine with phosphorothioate linkage
  modified_base 16: mod_base = OTHER; note = 2'-O-N-methyl acetamide modified thymine with phosphorothioate linkage
  modified_base 17: mod_base = OTHER; note = 2'-O-N-methyl acetamide modified nucleotide with phosphorothioate linkage
  modified_base 18: mod_base = OTHER; note = 2'-O-N-methyl acetamide modified nucleotide
  modified_base 19: mod_base = OTHER; note = 2'-O-methoxyethyl modified 5-methyl cytosine
  misc_feature 1..19: note = RNA
  misc_feature 20: note = DNA
tcactttcataatgctggca

SEQ ID NO: 285 - DNA, 20 bp, synthetic construct
  source 1..20: mol_type = other DNA
  modified_base 1: mod_base = OTHER; note = 2'-O-N-methyl acetamide modified thymine with phosphorothioate linkage
  modified_base 2: mod_base = OTHER; note = 2'-O-N-methyl acetamide modified 5-methyl cytosine with phosphorothioate linkage
  modified_base 3: mod_base = OTHER; note = 2'-O-N-methyl acetamide modified nucleotide with phosphorothioate linkage
  modified_base 4: mod_base = OTHER; note = 2'-O-N-methyl acetamide modified 5-methyl cytosine with phosphorothioate linkage
  modified_base 5: mod_base = OTHER; note = 2'-O-N-methyl acetamide modified thymine with phosphorothioate linkage
  modified_base 6: mod_base = OTHER; note = 2'-O-N-methyl acetamide modified thymine with phosphorothioate linkage
  modified_base 7: mod_base = OTHER; note = 2'-O-N-methyl acetamide modified thymine with phosphorothioate linkage
  modified_base 8: mod_base = OTHER; note = 2'-O-N-methyl acetamide modified 5-methyl cytosine with phosphorothioate linkage
  modified_base 9: mod_base = OTHER; note = 2'-O-N-methyl acetamide modified nucleotide with phosphorothioate linkage
  modified_base 10: mod_base = OTHER; note = 2'-O-N-methyl acetamide modified thymine with phosphorothioate linkage
  modified_base 11: mod_base = OTHER; note = 2'-O-N-methyl acetamide modified nucleotide with phosphorothioate linkage
  modified_base 12: mod_base = OTHER; note = 2'-O-N-methyl acetamide modified nucleotide with phosphorothioate linkage
  modified_base 13: mod_base = OTHER; note = 2'-O-N-methyl acetamide modified thymine with phosphorothioate linkage
  modified_base 14: mod_base = OTHER; note = 2'-O-N-methyl acetamide modified nucleotide with phosphorothioate linkage
  modified_base 15: mod_base = OTHER; note = 2'-O-N-methyl acetamide modified 5-methyl cytosine with phosphorothioate linkage
  modified_base 16: mod_base = OTHER; note = 2'-O-N-methyl acetamide modified thymine with phosphorothioate linkage
  modified_base 17: mod_base = OTHER; note = 2'-O-N-methyl acetamide modified nucleotide with phosphorothioate linkage
  modified_base 18: mod_base = OTHER; note = 2'-O-N-methyl acetamide modified nucleotide
  modified_base 19: mod_base = OTHER; note = 5-methyl cytosine
  misc_feature 1..18: note = RNA
  misc_feature 19..20: note = DNA
tcactttcataatgctggca

SEQ ID NO: 286 - DNA, 20 bp, synthetic construct
  source 1..20: mol_type = other DNA
  modified_base 1: mod_base = OTHER; note = 2'-O-N-methyl acetamide modified thymine with phosphorothioate linkage
  modified_base 2: mod_base = OTHER; note = 2'-O-N-methyl acetamide modified 5-methyl cytosine with phosphorothioate linkage
  modified_base 3: mod_base = OTHER; note = 2'-O-N-methyl acetamide modified nucleotide with phosphorothioate linkage
  modified_base 4: mod_base = OTHER; note = 2'-O-N-methyl acetamide modified 5-methyl cytosine with phosphorothioate linkage
  modified_base 5: mod_base = OTHER; note = 2'-O-N-methyl acetamide modified thymine with phosphorothioate linkage
  modified_base 6: mod_base = OTHER; note = 2'-O-N-methyl acetamide modified thymine with phosphorothioate linkage
  modified_base 7: mod_base = OTHER; note = 2'-O-N-methyl acetamide modified thymine with phosphorothioate linkage
  modified_base 8: mod_base = OTHER; note = 2'-O-N-methyl acetamide modified 5-methyl cytosine with phosphorothioate linkage
  modified_base 9: mod_base = OTHER; note = 2'-O-N-methyl acetamide modified nucleotide with phosphorothioate linkage
  modified_base 10: mod_base = OTHER; note = 2'-O-N-methyl acetamide modified thymine with phosphorothioate linkage
  modified_base 11: mod_base = OTHER; note = 2'-O-N-methyl acetamide modified nucleotide with phosphorothioate linkage
  modified_base 12: mod_base = OTHER; note = 2'-O-N-methyl acetamide modified nucleotide with phosphorothioate linkage
  modified_base 13: mod_base = OTHER; note = 2'-O-N-methyl acetamide modified thymine with phosphorothioate linkage
  modified_base 14: mod_base = OTHER; note = 2'-O-N-methyl acetamide modified nucleotide with phosphorothioate linkage
  modified_base 15: mod_base = OTHER; note = 2'-O-N-methyl acetamide modified 5-methyl cytosine with phosphorothioate linkage
  modified_base 16: mod_base = OTHER; note = 2'-O-N-methyl acetamide modified thymine with phosphorothioate linkage
  modified_base 17: mod_base = OTHER; note = 2'-O-N-methyl acetamide modified nucleotide with phosphorothioate linkage
  modified_base 18: mod_base = OTHER; note = 2'-O-N-methyl acetamide modified nucleotide
  modified_base 19: mod_base = OTHER; note = 2'-O-methoxyethyl modified nucleotide
  misc_feature 1..19: note = RNA
  misc_feature 20: note = DNA
tcactttcataatgctggaa

SEQ ID NO: 287 - DNA, 20 bp, synthetic construct
  source 1..20: mol_type = other DNA
  modified_base 1: mod_base = OTHER; note = 2'-O-N-methyl acetamide modified thymine with phosphorothioate linkage
  modified_base 2: mod_base = OTHER; note = 2'-O-N-methyl acetamide modified 5-methyl cytosine with phosphorothioate linkage
  modified_base 3: mod_base = OTHER; note = 2'-O-N-methyl acetamide modified nucleotide with phosphorothioate linkage
  modified_base 4: mod_base = OTHER; note = 2'-O-N-methyl acetamide modified 5-methyl cytosine with phosphorothioate linkage
  modified_base 5: mod_base = OTHER; note = 2'-O-N-methyl acetamide modified thymine with phosphorothioate linkage
  modified_base 6: mod_base = OTHER; note = 2'-O-N-methyl acetamide modified thymine with phosphorothioate linkage
  modified_base 7: mod_base = OTHER; note = 2'-O-N-methyl acetamide modified thymine with phosphorothioate linkage
  modified_base 8: mod_base = OTHER; note = 2'-O-N-methyl acetamide modified 5-methyl cytosine with phosphorothioate linkage
  modified_base 9: mod_base = OTHER; note = 2'-O-N-methyl acetamide modified nucleotide with phosphorothioate linkage
  modified_base 10: mod_base = OTHER; note = 2'-O-N-methyl acetamide modified thymine with phosphorothioate linkage
  modified_base 11: mod_base = OTHER; note = 2'-O-N-methyl acetamide modified nucleotide with phosphorothioate linkage
  modified_base 12: mod_base = OTHER; note = 2'-O-N-methyl acetamide modified nucleotide with phosphorothioate linkage
  modified_base 13: mod_base = OTHER; note = 2'-O-N-methyl acetamide modified thymine with phosphorothioate linkage
  modified_base 14: mod_base = OTHER; note = 2'-O-N-methyl acetamide modified nucleotide with phosphorothioate linkage
  modified_base 15: mod_base = OTHER; note = 2'-O-N-methyl acetamide modified 5-methyl cytosine with phosphorothioate linkage
  modified_base 16: mod_base = OTHER; note = 2'-O-N-methyl acetamide modified thymine with phosphorothioate linkage
  modified_base 17: mod_base = OTHER; note = 2'-O-N-methyl acetamide modified nucleotide with phosphorothioate linkage
  modified_base 18: mod_base = OTHER; note = 2'-O-N-methyl acetamide modified nucleotide
  modified_base 20: mod_base = OTHER; note = 2'-O-methoxyethyl modified nucleotide
  misc_feature 1..18: note = RNA
  misc_feature 19: note = DNA
  misc_feature 20: note = RNA
tcactttcataatgctggaa

SEQ ID NO: 288 - DNA, 20 bp, synthetic construct
  source 1..20: mol_type = other DNA
  modified_base 1: mod_base = OTHER; note = 2'-O-N-methyl acetamide modified thymine with phosphorothioate linkage
  modified_base 2: mod_base = OTHER; note = 2'-O-N-methyl acetamide modified 5-methyl cytosine with phosphorothioate linkage
  modified_base 3: mod_base = OTHER; note = 2'-O-N-methyl acetamide modified nucleotide with phosphorothioate linkage
  modified_base 4: mod_base = OTHER; note = 2'-O-N-methyl acetamide modified 5-methyl cytosine with phosphorothioate linkage
  modified_base 5: mod_base = OTHER; note = 2'-O-N-methyl acetamide modified thymine with phosphorothioate linkage
  modified_base 6: mod_base = OTHER; note = 2'-O-N-methyl acetamide modified thymine with phosphorothioate linkage
  modified_base 7: mod_base = OTHER; note = 2'-O-N-methyl acetamide modified thymine with phosphorothioate linkage
  modified_base 8: mod_base = OTHER; note = 2'-O-N-methyl acetamide modified 5-methyl cytosine with phosphorothioate linkage
  modified_base 9: mod_base = OTHER; note = 2'-O-N-methyl acetamide modified nucleotide with phosphorothioate linkage
  modified_base 10: mod_base = OTHER; note = 2'-O-N-methyl acetamide modified thymine with phosphorothioate linkage
  modified_base 11: mod_base = OTHER; note = 2'-O-N-methyl acetamide modified nucleotide with phosphorothioate linkage
  modified_base 12: mod_base = OTHER; note = 2'-O-N-methyl acetamide modified nucleotide with phosphorothioate linkage
  modified_base 13: mod_base = OTHER; note = 2'-O-N-methyl acetamide modified thymine with phosphorothioate linkage
  modified_base 14: mod_base = OTHER; note = 2'-O-N-methyl acetamide modified nucleotide with phosphorothioate linkage
  modified_base 15: mod_base = OTHER; note = 2'-O-N-methyl acetamide modified 5-methyl cytosine with phosphorothioate linkage
  modified_base 16: mod_base = OTHER; note = 2'-O-N-methyl acetamide modified thymine with phosphorothioate linkage
  modified_base 17: mod_base = OTHER; note = 2'-O-N-methyl acetamide modified nucleotide with phosphorothioate linkage
  modified_base 18: mod_base = OTHER; note = 2'-O-N-methyl acetamide modified nucleotide
  modified_base 19: mod_base = OTHER; note = 5-methyl cytosine
  modified_base 20: mod_base = OTHER; note = 2'-O-methoxyethyl modified nucleotide
  misc_feature 1..18: note = RNA
  misc_feature 19: note = DNA
  misc_feature 20: note = RNA
tcactttcataatgctggca

SEQ ID NO: 289 - RNA, 20 nt, synthetic construct
  source 1..20: mol_type = other RNA
  modified_base 1: mod_base = OTHER; note = 2'-O-N-methyl acetamide modified thymine with phosphorothioate linkage
  modified_base 2: mod_base = OTHER; note = 2'-O-N-methyl acetamide modified 5-methyl cytosine with phosphorothioate linkage
  modified_base 3: mod_base = OTHER; note = 2'-O-N-methyl acetamide modified nucleotide with phosphorothioate linkage
  modified_base 4: mod_base = OTHER; note = 2'-O-N-methyl acetamide modified 5-methyl cytosine with phosphorothioate linkage
  modified_base 5: mod_base = OTHER; note = 2'-O-N-methyl acetamide modified thymine with phosphorothioate linkage
  modified_base 6: mod_base = OTHER; note = 2'-O-N-methyl acetamide modified thymine with phosphorothioate linkage
  modified_base 7: mod_base = OTHER; note = 2'-O-N-methyl acetamide modified thymine with phosphorothioate linkage
  modified_base 8: mod_base = OTHER; note = 2'-O-N-methyl acetamide modified 5-methyl cytosine with phosphorothioate linkage
  modified_base 9: mod_base = OTHER; note = 2'-O-N-methyl acetamide modified nucleotide with phosphorothioate linkage
  modified_base 10: mod_base = OTHER; note = 2'-O-N-methyl acetamide modified thymine with phosphorothioate linkage
  modified_base 11: mod_base = OTHER; note = 2'-O-N-methyl acetamide modified nucleotide with phosphorothioate linkage
  modified_base 12: mod_base = OTHER; note = 2'-O-N-methyl acetamide modified nucleotide with phosphorothioate linkage
  modified_base 13: mod_base = OTHER; note = 2'-O-N-methyl acetamide modified thymine with phosphorothioate linkage
  modified_base 14: mod_base = OTHER; note = 2'-O-N-methyl acetamide modified nucleotide with phosphorothioate linkage
  modified_base 15: mod_base = OTHER; note = 2'-O-N-methyl acetamide modified 5-methyl cytosine with phosphorothioate linkage
  modified_base 16: mod_base = OTHER; note = 2'-O-N-methyl acetamide modified thymine with phosphorothioate linkage
  modified_base 17: mod_base = OTHER; note = 2'-O-N-methyl acetamide modified nucleotide with phosphorothioate linkage
  modified_base 18: mod_base = OTHER; note = 2'-O-N-methyl acetamide modified nucleotide
  modified_base 19: mod_base = OTHER; note = 2'-O-methoxyethyl modified nucleotide
  modified_base 20: mod_base = OTHER; note = 2'-O-methoxyethyl modified nucleotide
tcactttcataatgctggaa

SEQ ID NO: 290 - RNA, 20 nt, synthetic construct
  source 1..20: mol_type = other RNA
  modified_base 1: mod_base = OTHER; note = 2'-O-N-methyl acetamide modified thymine with phosphorothioate linkage
  modified_base 2: mod_base = OTHER; note = 2'-O-N-methyl acetamide modified 5-methyl cytosine with phosphorothioate linkage
  modified_base 3: mod_base = OTHER; note = 2'-O-N-methyl acetamide modified nucleotide with phosphorothioate linkage
  modified_base 4: mod_base = OTHER; note = 2'-O-N-methyl acetamide modified 5-methyl cytosine with phosphorothioate linkage
  modified_base 5: mod_base = OTHER; note = 2'-O-N-methyl acetamide modified thymine with phosphorothioate linkage
  modified_base 6: mod_base = OTHER; note = 2'-O-N-methyl acetamide modified thymine with phosphorothioate linkage
  modified_base 7: mod_base = OTHER; note = 2'-O-N-methyl acetamide modified thymine with phosphorothioate linkage
  modified_base 8: mod_base = OTHER; note = 2'-O-N-methyl acetamide modified 5-methyl cytosine with phosphorothioate linkage
  modified_base 9: mod_base = OTHER; note = 2'-O-N-methyl acetamide modified nucleotide with phosphorothioate linkage
  modified_base 10: mod_base = OTHER; note = 2'-O-N-methyl acetamide modified thymine with phosphorothioate linkage
  modified_base 11: mod_base = OTHER; note = 2'-O-N-methyl acetamide modified nucleotide with phosphorothioate linkage
  modified_base 12: mod_base = OTHER; note = 2'-O-N-methyl acetamide modified nucleotide with phosphorothioate linkage
  modified_base 13: mod_base = OTHER; note = 2'-O-N-methyl acetamide modified thymine with phosphorothioate linkage
  modified_base 14: mod_base = OTHER; note = 2'-O-N-methyl acetamide modified nucleotide with phosphorothioate linkage
  modified_base 15: mod_base = OTHER; note = 2'-O-N-methyl acetamide modified 5-methyl cytosine with phosphorothioate linkage
  modified_base 16: mod_base = OTHER; note = 2'-O-N-methyl acetamide modified thymine with phosphorothioate linkage
  modified_base 17: mod_base = OTHER; note = 2'-O-N-methyl acetamide modified nucleotide with phosphorothioate linkage
  modified_base 18: mod_base = OTHER; note = 2'-O-N-methyl acetamide modified nucleotide
  modified_base 19: mod_base = OTHER; note = 2'-O-methoxyethyl modified 5-methyl cytosine
  modified_base 20: mod_base = OTHER; note = 2'-O-methoxyethyl modified nucleotide
tcactttcataatgctggca

SEQ ID NO: 291 - DNA, 20 bp, synthetic construct
  source 1..20: mol_type = other DNA
  modified_base 1: mod_base = OTHER; note = 2'-O-methoxyethyl modified thymine with phosphorothioate linkage
  modified_base 2: mod_base = OTHER; note = 2'-O-methoxyethyl modified 5-methyl cytosine with phosphorothioate linkage
  modified_base 3: mod_base = OTHER; note = 2'-O-methoxyethyl modified nucleotide with phosphorothioate linkage
  modified_base 4: mod_base = OTHER; note = 2'-O-methoxyethyl modified 5-methyl cytosine with phosphorothioate linkage
  modified_base 5: mod_base = OTHER; note = 2'-O-methoxyethyl modified thymine with phosphorothioate linkage
  modified_base 6: mod_base = OTHER; note = 2'-O-methoxyethyl modified thymine with phosphorothioate linkage
  modified_base 7: mod_base = OTHER; note = 2'-O-methoxyethyl modified thymine with phosphorothioate linkage
  modified_base 8: mod_base = OTHER; note = 2'-O-methoxyethyl modified 5-methyl cytosine with phosphorothioate linkage
  modified_base 9: mod_base = OTHER; note = 2'-O-methoxyethyl modified nucleotide with phosphorothioate linkage
  modified_base 10: mod_base = OTHER; note = 2'-O-methoxyethyl modified thymine with phosphorothioate linkage
  modified_base 11: mod_base = OTHER; note = 2'-O-methoxyethyl modified nucleotide with phosphorothioate linkage
  modified_base 12: mod_base = OTHER; note = 2'-O-methoxyethyl modified nucleotide with phosphorothioate linkage
  modified_base 13: mod_base = OTHER; note = 2'-O-methoxyethyl modified thymine with phosphorothioate linkage
  modified_base 14: mod_base = OTHER; note = 2'-O-methoxyethyl modified nucleotide with phosphorothioate linkage
  modified_base 15: mod_base = OTHER; note = 2'-O-methoxyethyl modified 5-methyl cytosine with phosphorothioate linkage
  modified_base 16: mod_base = OTHER; note = 2'-O-methoxyethyl modified thymine with phosphorothioate linkage
  modified_base 17: mod_base = OTHER; note = 2'-O-methoxyethyl modified nucleotide with phosphorothioate linkage
  modified_base 18: mod_base = OTHER; note = 2'-O-methoxyethyl modified nucleotide
  misc_feature 1..18: note = RNA
  misc_feature 19..20: note = DNA
tcactttcataatgctggaa

SEQ ID NO: 292 - DNA, 20 bp, synthetic construct
  source 1..20: mol_type = other DNA
  modified_base 1: mod_base = OTHER; note = 2'-O-methoxyethyl modified thymine with phosphorothioate linkage
  modified_base 2: mod_base = OTHER; note = 2'-O-methoxyethyl modified 5-methyl cytosine with phosphorothioate linkage
  modified_base 3: mod_base = OTHER; note = 2'-O-methoxyethyl modified nucleotide with phosphorothioate linkage
  modified_base 4: mod_base = OTHER; note = 2'-O-methoxyethyl modified 5-methyl cytosine with phosphorothioate linkage
  modified_base 5: mod_base = OTHER; note = 2'-O-methoxyethyl modified thymine with phosphorothioate linkage
  modified_base 6: mod_base = OTHER; note = 2'-O-methoxyethyl modified thymine with phosphorothioate linkage
  modified_base 7: mod_base = OTHER; note = 2'-O-methoxyethyl modified thymine with phosphorothioate linkage
  modified_base 8: mod_base = OTHER; note = 2'-O-methoxyethyl modified 5-methyl cytosine with phosphorothioate linkage
  modified_base 9: mod_base = OTHER; note = 2'-O-methoxyethyl modified nucleotide with phosphorothioate linkage
  modified_base 10: mod_base = OTHER; note = 2'-O-methoxyethyl modified thymine with phosphorothioate linkage
  modified_base 11: mod_base = OTHER; note = 2'-O-methoxyethyl modified nucleotide with phosphorothioate linkage
  modified_base 12: mod_base = OTHER; note = 2'-O-methoxyethyl modified nucleotide with phosphorothioate linkage
  modified_base 13: mod_base = OTHER; note = 2'-O-methoxyethyl modified thymine with phosphorothioate linkage
  modified_base 14: mod_base = OTHER; note = 2'-O-methoxyethyl modified nucleotide with phosphorothioate linkage
  modified_base 15: mod_base = OTHER; note = 2'-O-methoxyethyl modified 5-methyl cytosine with phosphorothioate linkage
  modified_base 16: mod_base = OTHER; note = 2'-O-methoxyethyl modified thymine with phosphorothioate linkage
  modified_base 17: mod_base = OTHER; note = 2'-O-methoxyethyl modified nucleotide with phosphorothioate linkage
  modified_base 18: mod_base = OTHER; note = 2'-O-methoxyethyl modified nucleotide
  modified_base 19: mod_base = OTHER; note = 2'-O-methoxyethyl modified nucleotide
  misc_feature 1..19: note = RNA
  misc_feature 20: note = DNA
tcactttcataatgctggaa

SEQ ID NO: 293 - DNA, 20 bp, synthetic construct
  source 1..20: mol_type = other DNA
  modified_base 1: mod_base = OTHER; note = 2'-O-methoxyethyl modified thymine with phosphorothioate linkage
  modified_base 2: mod_base = OTHER; note = 2'-O-methoxyethyl modified 5-methyl cytosine with phosphorothioate linkage
  modified_base 3: mod_base = OTHER; note = 2'-O-methoxyethyl modified nucleotide with phosphorothioate linkage
  modified_base 4: mod_base = OTHER; note = 2'-O-methoxyethyl modified 5-methyl cytosine with phosphorothioate linkage
  modified_base 5: mod_base = OTHER; note = 2'-O-methoxyethyl modified thymine with phosphorothioate linkage
  modified_base 6: mod_base = OTHER; note = 2'-O-methoxyethyl modified thymine with phosphorothioate linkage
  modified_base 7: mod_base = OTHER; note = 2'-O-methoxyethyl modified thymine with phosphorothioate linkage
  modified_base 8: mod_base = OTHER; note = 2'-O-methoxyethyl modified 5-methyl cytosine with phosphorothioate linkage
  modified_base 9: mod_base = OTHER; note = 2'-O-methoxyethyl modified nucleotide with phosphorothioate linkage
  modified_base 10: mod_base = OTHER; note = 2'-O-methoxyethyl modified thymine with phosphorothioate linkage
  modified_base 11: mod_base = OTHER; note = 2'-O-methoxyethyl modified nucleotide with phosphorothioate linkage
  modified_base 12: mod_base = OTHER; note = 2'-O-methoxyethyl modified nucleotide with phosphorothioate linkage
  modified_base 13: mod_base = OTHER; note = 2'-O-methoxyethyl modified thymine with phosphorothioate linkage
  modified_base 14: mod_base = OTHER; note = 2'-O-methoxyethyl modified nucleotide with phosphorothioate linkage
  modified_base 15: mod_base = OTHER; note = 2'-O-methoxyethyl modified 5-methyl cytosine with phosphorothioate linkage
  modified_base 16: mod_base = OTHER; note = 2'-O-methoxyethyl modified thymine with phosphorothioate linkage
  modified_base 17: mod_base = OTHER; note = 2'-O-methoxyethyl modified nucleotide with phosphorothioate linkage
  modified_base 18: mod_base = OTHER; note = 2'-O-methoxyethyl modified nucleotide
  modified_base 20: mod_base = OTHER; note = 2'-O-methoxyethyl modified 5-methyl cytosine
  misc_feature 1..18: note = RNA
  misc_feature 19: note = DNA
  misc_feature 20: note = RNA
tcactttcataatgctggac

SEQ ID NO: 294 - DNA, 20 bp, synthetic construct
  source 1..20: mol_type = other DNA
  modified_base 1: mod_base = OTHER; note = 2'-O-methoxyethyl modified thymine with phosphorothioate linkage
  modified_base 2: mod_base = OTHER; note = 2'-O-methoxyethyl modified 5-methyl cytosine with phosphorothioate linkage
  modified_base 3: mod_base = OTHER; note = 2'-O-methoxyethyl modified nucleotide with phosphorothioate linkage
  modified_base 4: mod_base = OTHER; note = 2'-O-methoxyethyl modified 5-methyl cytosine with phosphorothioate linkage
  modified_base 5: mod_base = OTHER; note = 2'-O-methoxyethyl modified thymine with phosphorothioate linkage
  modified_base 6: mod_base = OTHER; note = 2'-O-methoxyethyl modified thymine with phosphorothioate linkage
  modified_base 7: mod_base = OTHER; note = 2'-O-methoxyethyl modified thymine with phosphorothioate linkage
  modified_base 8: mod_base = OTHER; note = 2'-O-methoxyethyl modified 5-methyl cytosine with phosphorothioate linkage
  modified_base 9: mod_base = OTHER; note = 2'-O-methoxyethyl modified nucleotide with phosphorothioate linkage
  modified_base 10: mod_base = OTHER; note = 2'-O-methoxyethyl modified thymine with phosphorothioate linkage
  modified_base 11: mod_base = OTHER; note = 2'-O-methoxyethyl modified nucleotide with phosphorothioate linkage
  modified_base 12: mod_base = OTHER; note = 2'-O-methoxyethyl modified nucleotide with phosphorothioate linkage
  modified_base 13: mod_base = OTHER; note = 2'-O-methoxyethyl modified thymine with phosphorothioate linkage
  modified_base 14: mod_base = OTHER; note = 2'-O-methoxyethyl modified nucleotide with phosphorothioate linkage
  modified_base 15: mod_base = OTHER; note = 2'-O-methoxyethyl modified 5-methyl cytosine with phosphorothioate linkage
  modified_base 16: mod_base = OTHER; note = 2'-O-methoxyethyl modified thymine with phosphorothioate linkage
  modified_base 17: mod_base = OTHER; note = 2'-O-methoxyethyl modified nucleotide with phosphorothioate linkage
  modified_base 18: mod_base = OTHER; note = 2'-O-methoxyethyl modified nucleotide
  modified_base 20: mod_base = OTHER; note = 2'-O-methoxyethyl modified thymine
  misc_feature 1..18: note = RNA
  misc_feature 19: note = DNA
  misc_feature 20: note = RNA
tcactttcataatgctggtt

SEQ ID NO: 295 - DNA, 20 bp, synthetic construct
  source 1..20: mol_type = other DNA
  modified_base 1: mod_base = OTHER; note = 2'-O-methoxyethyl modified thymine with phosphorothioate linkage
  modified_base 2: mod_base = OTHER; note = 2'-O-methoxyethyl modified 5-methyl cytosine with phosphorothioate linkage
  modified_base 3: mod_base = OTHER; note = 2'-O-methoxyethyl modified nucleotide with phosphorothioate linkage
  modified_base 4: mod_base = OTHER; note = 2'-O-methoxyethyl modified 5-methyl cytosine with phosphorothioate linkage
  modified_base 5: mod_base = OTHER; note = 2'-O-methoxyethyl modified thymine with phosphorothioate linkage
  modified_base 6: mod_base = OTHER; note = 2'-O-methoxyethyl modified thymine with phosphorothioate linkage
  modified_base 7: mod_base = OTHER; note = 2'-O-methoxyethyl modified thymine with phosphorothioate linkage
  modified_base 8: mod_base = OTHER; note = 2'-O-methoxyethyl modified 5-methyl cytosine with phosphorothioate linkage
  modified_base 9: mod_base = OTHER; note = 2'-O-methoxyethyl modified nucleotide with phosphorothioate linkage
  modified_base 10: mod_base = OTHER; note = 2'-O-methoxyethyl modified thymine with phosphorothioate linkage
  modified_base 11: mod_base = OTHER; note = 2'-O-methoxyethyl modified nucleotide with phosphorothioate linkage
  modified_base 12: mod_base = OTHER; note = 2'-O-methoxyethyl modified nucleotide with phosphorothioate linkage
  modified_base 13: mod_base = OTHER; note = 2'-O-methoxyethyl modified thymine with phosphorothioate linkage
  modified_base 14: mod_base = OTHER; note = 2'-O-methoxyethyl modified nucleotide with phosphorothioate linkage
  modified_base 15: mod_base = OTHER; note = 2'-O-methoxyethyl modified 5-methyl cytosine with phosphorothioate linkage
  modified_base 16: mod_base = OTHER; note = 2'-O-methoxyethyl modified thymine with phosphorothioate linkage
  modified_base 17: mod_base = OTHER; note = 2'-O-methoxyethyl modified nucleotide with phosphorothioate linkage
  modified_base 18: mod_base = OTHER; note = 2'-O-methoxyethyl modified nucleotide
  modified_base 19: mod_base = OTHER; note = 5-methyl cytosine
  misc_feature 1..18: note = RNA
  misc_feature 19..20: note = DNA
tcactttcataatgctggca

SEQ ID NO: 296 - DNA, 20 bp, synthetic construct
  source 1..20: mol_type = other DNA
  modified_base 1: mod_base = OTHER; note = 2'-O-methoxyethyl modified thymine with phosphorothioate linkage
  modified_base 2: mod_base = OTHER; note = 2'-O-methoxyethyl modified 5-methyl cytosine with phosphorothioate linkage
  modified_base 3: mod_base = OTHER; note = 2'-O-methoxyethyl modified nucleotide with phosphorothioate linkage
  modified_base 4: mod_base = OTHER; note = 2'-O-methoxyethyl modified 5-methyl cytosine with phosphorothioate linkage
  modified_base 5: mod_base = OTHER; note = 2'-O-methoxyethyl modified thymine with phosphorothioate linkage
  modified_base 6: mod_base = OTHER; note = 2'-O-methoxyethyl modified thymine with phosphorothioate linkage
  modified_base 7: mod_base = OTHER; note = 2'-O-methoxyethyl modified thymine with phosphorothioate linkage
  modified_base 8: mod_base = OTHER; note = 2'-O-methoxyethyl modified 5-methyl cytosine with phosphorothioate linkage
  modified_base 9: mod_base = OTHER; note = 2'-O-methoxyethyl modified nucleotide with phosphorothioate linkage
  modified_base 10: mod_base = OTHER; note = 2'-O-methoxyethyl modified thymine with phosphorothioate linkage
  modified_base 11: mod_base = OTHER; note = 2'-O-methoxyethyl modified nucleotide with phosphorothioate linkage
  modified_base 12: mod_base = OTHER; note = 2'-O-methoxyethyl modified nucleotide with phosphorothioate linkage
  modified_base 13: mod_base = OTHER; note = 2'-O-methoxyethyl modified thymine with phosphorothioate linkage
  modified_base 14: mod_base = OTHER; note = 2'-O-methoxyethyl modified nucleotide with phosphorothioate linkage
  modified_base 15: mod_base = OTHER; note = 2'-O-methoxyethyl modified 5-methyl cytosine with phosphorothioate linkage
  modified_base 16: mod_base = OTHER; note = 2'-O-methoxyethyl modified thymine with phosphorothioate linkage
  modified_base 17: mod_base = OTHER; note = 2'-O-methoxyethyl modified nucleotide with phosphorothioate linkage
  modified_base 18: mod_base = OTHER; note = 2'-O-methoxyethyl modified nucleotide
  modified_base 19: mod_base = OTHER; note = 2'-O-methoxyethyl modified 5-methyl cytosine
  misc_feature 1..19: note = RNA
  misc_feature 20: note = DNA
tcactttcataatgctggca

SEQ ID NO: 297 - DNA, 20 bp, synthetic construct
  source 1..20: mol_type = other DNA
  modified_base 1: mod_base = OTHER; note = 2'-O-methoxyethyl modified thymine with phosphorothioate linkage
  modified_base 2: mod_base = OTHER; note = 2'-O-methoxyethyl modified 5-methyl cytosine with phosphorothioate linkage
  modified_base 3: mod_base = OTHER; note = 2'-O-methoxyethyl modified nucleotide with phosphorothioate linkage
  modified_base 4: mod_base = OTHER; note = 2'-O-methoxyethyl modified 5-methyl cytosine with phosphorothioate linkage
  modified_base 5: mod_base = OTHER; note = 2'-O-methoxyethyl modified thymine with phosphorothioate linkage
  modified_base 6: mod_base = OTHER; note = 2'-O-methoxyethyl modified thymine with phosphorothioate linkage
  modified_base 7: mod_base = OTHER; note = 2'-O-methoxyethyl modified thymine with phosphorothioate linkage
  modified_base 8: mod_base = OTHER; note = 2'-O-methoxyethyl modified 5-methyl cytosine with phosphorothioate linkage
  modified_base 9: mod_base = OTHER; note = 2'-O-methoxyethyl modified nucleotide with phosphorothioate linkage
  modified_base 10: mod_base = OTHER; note = 2'-O-methoxyethyl modified thymine with phosphorothioate linkage
  modified_base 11: mod_base = OTHER; note = 2'-O-methoxyethyl modified nucleotide with phosphorothioate linkage
  modified_base 12: mod_base = OTHER; note = 2'-O-methoxyethyl modified nucleotide with phosphorothioate linkage
  modified_base 13: mod_base = OTHER; note = 2'-O-methoxyethyl modified thymine with phosphorothioate linkage
  modified_base 14: mod_base = OTHER; note = 2'-O-methoxyethyl modified nucleotide with phosphorothioate linkage
  modified_base 15: mod_base = OTHER; note = 2'-O-methoxyethyl modified 5-methyl cytosine with phosphorothioate linkage
  modified_base 16: mod_base = OTHER; note = 2'-O-methoxyethyl modified thymine with phosphorothioate linkage
  modified_base 17: mod_base = OTHER; note = 2'-O-methoxyethyl modified nucleotide with phosphorothioate linkage
  modified_base 18: mod_base = OTHER; note = 2'-O-methoxyethyl modified nucleotide
  modified_base 20: mod_base = OTHER; note = 2'-O-methoxyethyl modified thymine
  misc_feature 1..18: note = RNA
  misc_feature 19: note = DNA
  misc_feature 20: note = RNA
tcactttcataatgctggat

SEQ ID NO: 298 - DNA, 20 bp, synthetic construct
  source 1..20: mol_type = other DNA
  modified_base 1: mod_base = OTHER; note = 2'-O-methoxyethyl modified thymine with phosphorothioate linkage
  modified_base 2: mod_base = OTHER; note = 2'-O-methoxyethyl modified 5-methyl cytosine with phosphorothioate linkage
  modified_base 3: mod_base = OTHER; note = 2'-O-methoxyethyl modified nucleotide with phosphorothioate linkage
  modified_base 4: mod_base = OTHER; note = 2'-O-methoxyethyl modified 5-methyl cytosine with phosphorothioate linkage
  modified_base 5: mod_base = OTHER; note = 2'-O-methoxyethyl modified thymine with phosphorothioate linkage
  modified_base 6: mod_base = OTHER; note = 2'-O-methoxyethyl modified thymine with phosphorothioate linkage
  modified_base 7: mod_base = OTHER; note = 2'-O-methoxyethyl modified thymine with phosphorothioate linkage
  modified_base 8: mod_base = OTHER; note = 2'-O-methoxyethyl modified 5-methyl cytosine with phosphorothioate linkage
  modified_base 9: mod_base = OTHER; note = 2'-O-methoxyethyl modified nucleotide with phosphorothioate linkage
  modified_base 10: mod_base = OTHER; note = 2'-O-methoxyethyl modified thymine with phosphorothioate linkage
  modified_base 11: mod_base = OTHER; note = 2'-O-methoxyethyl modified nucleotide with phosphorothioate linkage
  modified_base 12: mod_base = OTHER; note = 2'-O-methoxyethyl modified nucleotide with phosphorothioate linkage
  modified_base 13: mod_base = OTHER; note = 2'-O-methoxyethyl modified thymine with phosphorothioate linkage
  modified_base 14: mod_base = OTHER; note = 2'-O-methoxyethyl modified nucleotide with phosphorothioate linkage
  modified_base 15: mod_base = OTHER; note = 2'-O-methoxyethyl modified 5-methyl cytosine with phosphorothioate linkage
  modified_base 16: mod_base = OTHER; note = 2'-O-methoxyethyl modified thymine with phosphorothioate linkage
  modified_base 17: mod_base = OTHER; note = 2'-O-methoxyethyl modified nucleotide with phosphorothioate linkage
  modified_base 18: mod_base = OTHER; note = 2'-O-methoxyethyl modified nucleotide
  modified_base 20: mod_base = OTHER; note = 2'-O-methoxyethyl modified nucleotide
  misc_feature 1..18: note = RNA
  misc_feature 19: note = DNA
  misc_feature 20: note = RNA
tcactttcataatgctggta

SEQ ID NO: 299 - DNA, 20 bp, synthetic construct
  source 1..20: mol_type = other DNA
  modified_base 1: mod_base = OTHER; note = 2'-O-methoxyethyl modified thymine with phosphorothioate linkage
  modified_base 2: mod_base = OTHER; note = 2'-O-methoxyethyl modified 5-methyl cytosine with phosphorothioate linkage
  modified_base 3: mod_base = OTHER; note = 2'-O-methoxyethyl modified nucleotide with phosphorothioate linkage
  modified_base 4: mod_base = OTHER; note = 2'-O-methoxyethyl modified 5-methyl cytosine with phosphorothioate linkage
  modified_base 5: mod_base = OTHER; note = 2'-O-methoxyethyl modified thymine with phosphorothioate linkage
  modified_base 6: mod_base = OTHER; note = 2'-O-methoxyethyl modified thymine with phosphorothioate linkage
  modified_base 7: mod_base = OTHER; note = 2'-O-methoxyethyl modified thymine with phosphorothioate linkage
  modified_base 8: mod_base = OTHER; note = 2'-O-methoxyethyl modified 5-methyl cytosine with phosphorothioate linkage
  modified_base 9: mod_base = OTHER; note = 2'-O-methoxyethyl modified nucleotide with phosphorothioate linkage
  modified_base 10: mod_base = OTHER; note = 2'-O-methoxyethyl modified thymine with phosphorothioate linkage
  modified_base 11: mod_base = OTHER; note = 2'-O-methoxyethyl modified nucleotide with phosphorothioate linkage
  modified_base 12: mod_base = OTHER; note = 2'-O-methoxyethyl modified nucleotide with phosphorothioate linkage
  modified_base 13: mod_base = OTHER; note = 2'-O-methoxyethyl modified thymine with phosphorothioate linkage
  modified_base 14: mod_base = OTHER; note = 2'-O-methoxyethyl modified nucleotide with phosphorothioate linkage
  modified_base 15: mod_base = OTHER; note = 2'-O-methoxyethyl modified 5-methyl cytosine with phosphorothioate linkage
  modified_base 16: mod_base = OTHER; note = 2'-O-methoxyethyl modified thymine with phosphorothioate linkage
  modified_base 17: mod_base = OTHER; note = 2'-O-methoxyethyl modified nucleotide with phosphorothioate linkage
  modified_base 18: mod_base = OTHER; note = 2'-O-methoxyethyl modified nucleotide
  modified_base 20: mod_base = OTHER; note = 2'-O-methoxyethyl modified nucleotide
  misc_feature 1..18: note = RNA
  misc_feature 19: note = DNA
  misc_feature 20: note = RNA
tcactttcataatgctggaa

SEQ ID NO: 300 - DNA, 20 bp, synthetic construct
  source 1..20: mol_type = other DNA
  modified_base 1: mod_base = OTHER; note = 2'-O-methoxyethyl modified thymine with phosphorothioate linkage
  modified_base 2: mod_base = OTHER; note = 2'-O-methoxyethyl modified 5-methyl cytosine with phosphorothioate linkage
  modified_base 3: mod_base = OTHER; note = 2'-O-methoxyethyl modified nucleotide with phosphorothioate linkage
  modified_base 4: mod_base = OTHER; note = 2'-O-methoxyethyl modified 5-methyl cytosine with phosphorothioate linkage
  modified_base 5: mod_base = OTHER; note = 2'-O-methoxyethyl modified thymine with phosphorothioate linkage
  modified_base 6: mod_base = OTHER; note = 2'-O-methoxyethyl modified thymine with phosphorothioate linkage
  modified_base 7: mod_base = OTHER; note = 2'-O-methoxyethyl modified thymine with phosphorothioate linkage
  modified_base 8: mod_base = OTHER; note = 2'-O-methoxyethyl modified 5-methyl cytosine with phosphorothioate linkage
  modified_base 9: mod_base = OTHER; note = 2'-O-methoxyethyl modified nucleotide with phosphorothioate linkage
  modified_base 10: mod_base = OTHER; note = 2'-O-methoxyethyl modified thymine with phosphorothioate linkage
  modified_base 11: mod_base = OTHER; note = 2'-O-methoxyethyl modified nucleotide with phosphorothioate linkage
  modified_base 12: mod_base = OTHER; note = 2'-O-methoxyethyl modified nucleotide with phosphorothioate linkage
  modified_base 13: mod_base = OTHER; note = 2'-O-methoxyethyl modified thymine with phosphorothioate linkage
  modified_base 14: mod_base = OTHER; note = 2'-O-methoxyethyl modified nucleotide with phosphorothioate linkage
  modified_base 15: mod_base = OTHER; note = 2'-O-methoxyethyl modified 5-methyl cytosine with phosphorothioate linkage
  modified_base 16: mod_base = OTHER; note = 2'-O-methoxyethyl modified thymine with phosphorothioate linkage
  modified_base 17: mod_base = OTHER; note = 2'-O-methoxyethyl modified nucleotide with phosphorothioate linkage
  modified_base 18: mod_base = OTHER; note = 2'-O-methoxyethyl modified nucleotide
  modified_base 20: mod_base = OTHER; note = 2'-O-methoxyethyl modified 5-methyl cytosine
  misc_feature 1..18: note = RNA
  misc_feature 19: note = DNA
  misc_feature 20: note = RNA
tcactttcataatgctggtc

SEQ ID NO: 301 - DNA, 20 bp, synthetic construct
  source 1..20: mol_type = other DNA
  modified_base 1: mod_base = OTHER; note = 2'-O-methoxyethyl modified thymine with phosphorothioate linkage
  modified_base 2: mod_base = OTHER; note = 2'-O-methoxyethyl modified 5-methyl cytosine with phosphorothioate linkage
  modified_base 3: mod_base = OTHER; note = 2'-O-methoxyethyl modified nucleotide with phosphorothioate linkage
  modified_base 4: mod_base = OTHER; note = 2'-O-methoxyethyl modified 5-methyl cytosine with phosphorothioate linkage
  modified_base 5: mod_base = OTHER; note = 2'-O-methoxyethyl modified thymine with phosphorothioate linkage
  modified_base 6: mod_base = OTHER; note = 2'-O-methoxyethyl modified thymine with phosphorothioate linkage
  modified_base 7: mod_base = OTHER; note = 2'-O-methoxyethyl modified thymine with phosphorothioate linkage
  modified_base 8: mod_base = OTHER; note = 2'-O-methoxyethyl modified 5-methyl cytosine with phosphorothioate linkage
  modified_base 9: mod_base = OTHER; note = 2'-O-methoxyethyl modified nucleotide with phosphorothioate linkage
  modified_base 10: mod_base = OTHER; note = 2'-O-methoxyethyl modified thymine with phosphorothioate linkage
  modified_base 11: mod_base = OTHER; note = 2'-O-methoxyethyl modified nucleotide with phosphorothioate linkage
  modified_base 12: mod_base = OTHER; note = 2'-O-methoxyethyl modified nucleotide with phosphorothioate linkage
  modified_base 13: mod_base = OTHER; note = 2'-O-methoxyethyl modified thymine with phosphorothioate linkage
  modified_base 14: mod_base = OTHER; note = 2'-O-methoxyethyl modified nucleotide with phosphorothioate linkage
  modified_base 15: mod_base = OTHER; note = 2'-O-methoxyethyl modified 5-methyl cytosine with phosphorothioate linkage
  modified_base 16: mod_base = OTHER; note = 2'-O-methoxyethyl modified thymine with phosphorothioate linkage
  modified_base 17: mod_base = OTHER; note = 2'-O-methoxyethyl modified nucleotide with phosphorothioate linkage
  modified_base 18: mod_base = OTHER; note = 2'-O-methoxyethyl modified nucleotide
  modified_base 19: mod_base = OTHER; note = 5-methyl cytosine
  modified_base 20: mod_base = OTHER; note = 2'-O-methoxyethyl modified 5-methyl cytosine
  misc_feature 1..18: note = RNA
  misc_feature 19: note = DNA
  misc_feature 20: note = RNA
tcactttcataatgctggcc

SEQ ID NO: 302 - DNA, 20 bp, synthetic construct
  source 1..20: mol_type = other DNA
  modified_base 1: mod_base = OTHER; note = 2'-O-methoxyethyl modified thymine with phosphorothioate linkage
  modified_base 2: mod_base = OTHER; note = 2'-O-methoxyethyl modified 5-methyl cytosine with phosphorothioate linkage
  modified_base 3: mod_base = OTHER; note = 2'-O-methoxyethyl modified nucleotide with phosphorothioate linkage
  modified_base 4: mod_base = OTHER; note = 2'-O-methoxyethyl modified 5-methyl cytosine with phosphorothioate linkage
  modified_base 5: mod_base = OTHER; note = 2'-O-methoxyethyl modified thymine with phosphorothioate linkage
  modified_base 6: mod_base = OTHER; note = 2'-O-methoxyethyl modified thymine with phosphorothioate linkage
  modified_base 7: mod_base = OTHER; note = 2'-O-methoxyethyl modified thymine with phosphorothioate linkage
  modified_base 8: mod_base = OTHER; note = 2'-O-methoxyethyl modified 5-methyl cytosine with phosphorothioate linkage
  modified_base 9: mod_base = OTHER; note = 2'-O-methoxyethyl modified nucleotide with phosphorothioate linkage
  modified_base 10: mod_base = OTHER; note = 2'-O-methoxyethyl modified thymine with phosphorothioate linkage
  modified_base 11: mod_base = OTHER; note = 2'-O-methoxyethyl modified nucleotide with phosphorothioate linkage
  modified_base 12: mod_base = OTHER; note = 2'-O-methoxyethyl modified nucleotide with phosphorothioate linkage
  modified_base 13: mod_base = OTHER; note = 2'-O-methoxyethyl modified thymine with phosphorothioate linkage
  modified_base 14: mod_base = OTHER; note = 2'-O-methoxyethyl modified nucleotide with phosphorothioate linkage
  modified_base 15: mod_base = OTHER; note = 2'-O-methoxyethyl modified 5-methyl cytosine with phosphorothioate linkage
  modified_base 16: mod_base = OTHER; note = 2'-O-methoxyethyl modified thymine with phosphorothioate linkage
  modified_base 17: mod_base = OTHER; note = 2'-O-methoxyethyl modified nucleotide with phosphorothioate linkage
  modified_base 18: mod_base = OTHER; note = 2'-O-methoxyethyl modified nucleotide
  modified_base 19: mod_base = OTHER; note = 5-methyl cytosine
  modified_base 20: mod_base = OTHER; note = 2'-O-methoxyethyl modified thymine
  misc_feature 1..18: note = RNA
  misc_feature 19: note = DNA
  misc_feature 20: note = RNA
tcactttcataatgctggct

SEQ ID NO: 303 - DNA, 20 bp, synthetic construct
  source 1..20: mol_type = other DNA
  modified_base 1: mod_base = OTHER; note = 2'-O-methoxyethyl modified thymine with phosphorothioate linkage
  modified_base 2: mod_base = OTHER; note = 2'-O-methoxyethyl modified 5-methyl cytosine with phosphorothioate linkage
  modified_base 3: mod_base = OTHER; note = 2'-O-methoxyethyl modified nucleotide with phosphorothioate linkage
  modified_base 4: mod_base = OTHER; note = 2'-O-methoxyethyl modified 5-methyl cytosine with phosphorothioate linkage
  modified_base 5: mod_base = OTHER; note = 2'-O-methoxyethyl modified thymine with phosphorothioate linkage
  modified_base 6: mod_base = OTHER; note = 2'-O-methoxyethyl modified thymine with phosphorothioate linkage
  modified_base 7: mod_base = OTHER; note = 2'-O-methoxyethyl modified thymine with phosphorothioate linkage
  modified_base 8: mod_base = OTHER; note = 2'-O-methoxyethyl modified 5-methyl cytosine with phosphorothioate linkage
  modified_base 9: mod_base = OTHER; note = 2'-O-methoxyethyl modified nucleotide with phosphorothioate linkage
  modified_base 10: mod_base = OTHER; note = 2'-O-methoxyethyl modified thymine with phosphorothioate linkage
  modified_base 11: mod_base = OTHER; note = 2'-O-methoxyethyl modified nucleotide with phosphorothioate linkage
  modified_base 12: mod_base = OTHER; note = 2'-O-methoxyethyl modified nucleotide with phosphorothioate linkage
  modified_base 13: mod_base = OTHER; note = 2'-O-methoxyethyl modified thymine with phosphorothioate linkage
  modified_base 14: mod_base = OTHER; note = 2'-O-methoxyethyl modified nucleotide with phosphorothioate linkage
  modified_base 15: mod_base = OTHER; note = 2'-O-methoxyethyl modified 5-methyl cytosine with phosphorothioate linkage
  modified_base 16: mod_base = OTHER; note = 2'-O-methoxyethyl modified thymine with phosphorothioate linkage
  modified_base 17: mod_base = OTHER; note = 2'-O-methoxyethyl modified nucleotide with phosphorothioate linkage
  modified_base 18: mod_base = OTHER; note = 2'-O-methoxyethyl modified nucleotide
  modified_base 19: mod_base = OTHER; note = 5-methyl cytosine
  modified_base 20: mod_base = OTHER; note = 2'-O-methoxyethyl modified nucleotide
  misc_feature 1..18: note = RNA
  misc_feature 19: note = DNA
  misc_feature 20: note = RNA
tcactttcataatgctggca

SEQ ID NO: 304 - RNA, 20 nt, synthetic construct
  source 1..20: mol_type = other RNA
  modified_base 1: mod_base = OTHER; note = 2'-O-N-methyl acetamide modified thymine with phosphorothioate linkage
  modified_base 2: mod_base = OTHER; note = 2'-O-N-methyl acetamide modified 5-methyl cytosine with phosphorothioate linkage
  modified_base 3: mod_base = OTHER; note = 2'-O-N-methyl acetamide modified nucleotide with phosphorothioate linkage
  modified_base 4: mod_base = OTHER; note = 2'-O-N-methyl acetamide modified 5-methyl cytosine with phosphorothioate linkage
  modified_base 5: mod_base = OTHER; note = 2'-O-N-methyl acetamide modified thymine with phosphorothioate linkage
  modified_base 6: mod_base = OTHER; note = 2'-O-N-methyl acetamide modified thymine with phosphorothioate linkage
  modified_base 7: mod_base = OTHER; note = 2'-O-N-methyl acetamide modified thymine with phosphorothioate linkage
  modified_base 8: mod_base = OTHER; note = 2'-O-N-methyl acetamide modified 5-methyl cytosine with phosphorothioate linkage
  modified_base 9: mod_base = OTHER; note = 2'-O-N-methyl acetamide modified nucleotide with phosphorothioate linkage
  modified_base 10: mod_base = OTHER; note = 2'-O-N-methyl acetamide modified thymine with phosphorothioate linkage
  modified_base 11: mod_base = OTHER; note = 2'-O-N-methyl acetamide modified nucleotide with phosphorothioate linkage
  modified_base 12: mod_base = OTHER; note = 2'-O-N-methyl acetamide modified nucleotide with phosphorothioate linkage
  modified_base 13: mod_base = OTHER; note = 2'-O-N-methyl acetamide modified thymine with phosphorothioate linkage
  modified_base 14: mod_base = OTHER; note = 2'-O-N-methyl acetamide modified nucleotide with phosphorothioate linkage
  modified_base 15: mod_base = OTHER; note = 2'-O-N-methyl acetamide modified 5-methyl cytosine with phosphorothioate linkage
  modified_base 16: mod_base = OTHER; note = 2'-O-N-methyl acetamide modified thymine with phosphorothioate linkage
  modified_base 17: mod_base = OTHER; note = 2'-O-N-methyl acetamide modified nucleotide with phosphorothioate linkage
  modified_base 18: mod_base = OTHER; note = 2'-O-N-methyl acetamide modified nucleotide
  modified_base 19: mod_base = OTHER; note = 2'-O-methoxyethyl modified 5-methyl cytosine
  modified_base 20: mod_base = OTHER; note = 2'-O-methoxyethyl modified thymine
tcactttcataatgctggct

SEQ ID NO: 305 - RNA, 20 nt, synthetic construct
  source 1..20: mol_type = other RNA
  modified_base 1: mod_base = OTHER; note = 2'-O-methoxyethyl modified thymine with phosphorothioate linkage
  modified_base 2: mod_base = OTHER; note = 2'-O-methoxyethyl modified 5-methyl cytosine with phosphorothioate linkage
  modified_base 3: mod_base = OTHER; note = 2'-O-methoxyethyl modified nucleotide with phosphorothioate linkage
  modified_base 4: mod_base = OTHER; note = 2'-O-methoxyethyl modified 5-methyl cytosine with phosphorothioate linkage
  modified_base 5: mod_base = OTHER; note = 2'-O-methoxyethyl modified thymine with phosphorothioate linkage
  modified_base 6: mod_base = OTHER; note = 2'-O-methoxyethyl modified thymine with phosphorothioate linkage
  modified_base 7: mod_base = OTHER; note = 2'-O-methoxyethyl modified thymine with phosphorothioate linkage
  modified_base 8: mod_base = OTHER; note = 2'-O-methoxyethyl modified 5-methyl cytosine with phosphorothioate linkage
  modified_base 9: mod_base = OTHER; note = 2'-O-methoxyethyl modified nucleotide with phosphorothioate linkage
  modified_base 10: mod_base = OTHER; note = 2'-O-methoxyethyl modified thymine with phosphorothioate linkage
  modified_base 11: mod_base = OTHER; note = 2'-O-methoxyethyl modified nucleotide with phosphorothioate linkage
  modified_base 12: mod_base = OTHER; note = 2'-O-methoxyethyl modified nucleotide with phosphorothioate linkage
  modified_base 13: mod_base = OTHER; note = 2'-O-methoxyethyl modified thymine with phosphorothioate linkage
  modified_base 14: mod_base = OTHER; note = 2'-O-methoxyethyl modified nucleotide with phosphorothioate linkage
  modified_base 15: mod_base = OTHER; note = 2'-O-methoxyethyl modified 5-methyl cytosine with phosphorothioate linkage
  modified_base 16: mod_base = OTHER; note = 2'-O-methoxyethyl modified thymine with phosphorothioate linkage
  modified_base 17: mod_base = OTHER; note = 2'-O-methoxyethyl modified nucleotide with phosphorothioate linkage
  modified_base 18: mod_base = OTHER; note = 2'-O-methoxyethyl modified nucleotide
  modified_base 19: mod_base = OTHER; note = 2'-O-methoxyethyl modified nucleotide
  modified_base 20: mod_base = OTHER; note = 2'-O-methoxyethyl modified 5-methyl cytosine
tcactttcataatgctggac

SEQ ID NO: 306 - RNA, 20 nt, synthetic construct
  source 1..20: mol_type = other RNA
  modified_base 1: mod_base = OTHER; note = 2'-O-methoxyethyl modified thymine with phosphorothioate linkage
  modified_base 2: mod_base = OTHER; note = 2'-O-methoxyethyl modified 5-methyl cytosine with phosphorothioate linkage
  modified_base 3: mod_base = OTHER; note = 2'-O-methoxyethyl modified nucleotide with phosphorothioate linkage
  modified_base 4: mod_base = OTHER; note = 2'-O-methoxyethyl modified 5-methyl cytosine with phosphorothioate linkage
  modified_base 5: mod_base = OTHER; note = 2'-O-methoxyethyl modified thymine with phosphorothioate linkage
  modified_base 6: mod_base = OTHER; note = 2'-O-methoxyethyl modified thymine with phosphorothioate linkage
  modified_base 7: mod_base = OTHER; note = 2'-O-methoxyethyl modified thymine with phosphorothioate linkage
  modified_base 8: mod_base = OTHER; note = 2'-O-methoxyethyl modified 5-methyl cytosine with phosphorothioate linkage
  modified_base 9: mod_base = OTHER; note = 2'-O-methoxyethyl modified nucleotide with phosphorothioate linkage
  modified_base 10: mod_base = OTHER; note = 2'-O-methoxyethyl modified thymine with phosphorothioate linkage
  modified_base 11: mod_base = OTHER; note = 2'-O-methoxyethyl modified nucleotide with phosphorothioate linkage
  modified_base 12: mod_base = OTHER; note = 2'-O-methoxyethyl modified nucleotide with phosphorothioate linkage
  modified_base 13: mod_base = OTHER; note = 2'-O-methoxyethyl modified thymine with phosphorothioate linkage
  modified_base 14: mod_base = OTHER; note = 2'-O-methoxyethyl modified nucleotide with phosphorothioate linkage
  modified_base 15: mod_base = OTHER; note = 2'-O-methoxyethyl modified 5-methyl cytosine with phosphorothioate linkage
  modified_base 16: mod_base = OTHER; note = 2'-O-methoxyethyl modified thymine with phosphorothioate linkage
  modified_base 17: mod_base = OTHER; note = 2'-O-methoxyethyl modified nucleotide with phosphorothioate linkage
  modified_base 18: mod_base = OTHER; note = 2'-O-methoxyethyl modified nucleotide
  modified_base 19: mod_base = OTHER; note = 2'-O-methoxyethyl modified thymine
  modified_base 20: mod_base = OTHER; note = 2'-O-methoxyethyl modified thymine
tcactttcataatgctggtt

SEQ ID NO: 307 - RNA, 20 nt, synthetic construct
  source 1..20: mol_type = other RNA
  modified_base 1: mod_base = OTHER; note = 2'-O-methoxyethyl modified thymine with phosphorothioate linkage
  modified_base 2: mod_base = OTHER; note = 2'-O-methoxyethyl modified 5-methyl cytosine with phosphorothioate linkage
  modified_base 3: mod_base = OTHER; note = 2'-O-methoxyethyl modified nucleotide with phosphorothioate linkage
  modified_base 4: mod_base = OTHER; note = 2'-O-methoxyethyl modified 5-methyl cytosine with phosphorothioate linkage
  modified_base 5: mod_base = OTHER; note = 2'-O-methoxyethyl modified thymine with phosphorothioate linkage
  modified_base 6: mod_base = OTHER; note = 2'-O-methoxyethyl modified thymine with phosphorothioate linkage
  modified_base 7: mod_base = OTHER; note = 2'-O-methoxyethyl modified thymine with phosphorothioate linkage
  modified_base 8: mod_base = OTHER; note = 2'-O-methoxyethyl modified 5-methyl cytosine with phosphorothioate linkage
  modified_base 9: mod_base = OTHER; note = 2'-O-methoxyethyl modified nucleotide with phosphorothioate linkage
  modified_base 10: mod_base = OTHER; note = 2'-O-methoxyethyl modified thymine with phosphorothioate linkage
  modified_base 11: mod_base = OTHER; note = 2'-O-methoxyethyl modified nucleotide with phosphorothioate linkage
  modified_base 12: mod_base = OTHER; note = 2'-O-methoxyethyl modified nucleotide with phosphorothioate linkage
  modified_base 13: mod_base = OTHER; note = 2'-O-methoxyethyl modified thymine with phosphorothioate linkage
  modified_base 14: mod_base = OTHER; note = 2'-O-methoxyethyl modified nucleotide with phosphorothioate linkage
  modified_base 15: mod_base = OTHER; note = 2'-O-methoxyethyl modified 5-methyl cytosine with phosphorothioate linkage
  modified_base 16: mod_base = OTHER; note = 2'-O-methoxyethyl modified thymine with phosphorothioate linkage
  modified_base 17: mod_base = OTHER; note = 2'-O-methoxyethyl modified nucleotide with phosphorothioate linkage
  modified_base 18: mod_base = OTHER; note = 2'-O-methoxyethyl modified nucleotide
  modified_base 19: mod_base = OTHER; note = 2'-O-methoxyethyl modified nucleotide
  modified_base 20: mod_base = OTHER; note = 2'-O-methoxyethyl modified nucleotide
tcactttcataatgctggaa

SEQ ID NO: 308 - RNA, 20 nt, synthetic construct
  source 1..20: mol_type = other RNA
  modified_base 1: mod_base = OTHER; note = 2'-O-methoxyethyl modified thymine with phosphorothioate linkage
  modified_base 2: mod_base = OTHER; note = 2'-O-methoxyethyl modified 5-methyl cytosine with phosphorothioate linkage
  modified_base 3: mod_base = OTHER; note = 2'-O-methoxyethyl modified nucleotide with phosphorothioate linkage
  modified_base 4: mod_base = OTHER; note = 2'-O-methoxyethyl modified 5-methyl cytosine with phosphorothioate linkage
  modified_base 5: mod_base = OTHER; note = 2'-O-methoxyethyl modified thymine with phosphorothioate linkage
  modified_base 6: mod_base = OTHER; note = 2'-O-methoxyethyl modified thymine with phosphorothioate linkage
  modified_base 7: mod_base = OTHER; note = 2'-O-methoxyethyl modified thymine with phosphorothioate linkage
  modified_base 8: mod_base = OTHER; note = 2'-O-methoxyethyl modified 5-methyl cytosine with phosphorothioate linkage
  modified_base 9: mod_base = OTHER; note = 2'-O-methoxyethyl modified nucleotide with phosphorothioate linkage
  modified_base 10: mod_base = OTHER; note = 2'-O-methoxyethyl modified thymine with phosphorothioate linkage
  modified_base 11: mod_base = OTHER; note = 2'-O-methoxyethyl modified nucleotide with phosphorothioate linkage
  modified_base 12: mod_base = OTHER; note = 2'-O-methoxyethyl modified nucleotide with phosphorothioate linkage
  modified_base 13: mod_base = OTHER; note = 2'-O-methoxyethyl modified thymine with phosphorothioate linkage
  modified_base 14: mod_base = OTHER; note = 2'-O-methoxyethyl modified nucleotide with phosphorothioate linkage
  modified_base 15: mod_base = OTHER; note = 2'-O-methoxyethyl modified 5-methyl cytosine with phosphorothioate linkage
  modified_base 16: mod_base = OTHER; note = 2'-O-methoxyethyl modified thymine with phosphorothioate linkage
  modified_base 17: mod_base = OTHER; note = 2'-O-methoxyethyl modified nucleotide with phosphorothioate linkage
  modified_base 18: mod_base = OTHER; note = 2'-O-methoxyethyl modified nucleotide
  modified_base 19: mod_base = OTHER; note = 2'-O-methoxyethyl modified thymine
  modified_base 20: mod_base = OTHER; note = 2'-O-methoxyethyl modified 5-methyl cytosine
tcactttcataatgctggtc

SEQ ID NO: 309 - RNA, 20 nt, synthetic construct
  source 1..20: mol_type = other RNA
  modified_base 1: mod_base = OTHER; note = 2'-O-methoxyethyl modified thymine with phosphorothioate linkage
  modified_base 2: mod_base = OTHER; note = 2'-O-methoxyethyl modified 5-methyl cytosine with phosphorothioate linkage
  modified_base 3: mod_base = OTHER; note = 2'-O-methoxyethyl modified nucleotide with phosphorothioate linkage
  modified_base 4: mod_base = OTHER; note = 2'-O-methoxyethyl modified 5-methyl cytosine with phosphorothioate linkage
  modified_base 5: mod_base = OTHER; note = 2'-O-methoxyethyl modified thymine with phosphorothioate linkage
  modified_base 6: mod_base = OTHER; note = 2'-O-methoxyethyl modified thymine with phosphorothioate linkage
  modified_base 7: mod_base = OTHER; note = 2'-O-methoxyethyl modified thymine with phosphorothioate linkage
  modified_base 8: mod_base = OTHER; note = 2'-O-methoxyethyl modified 5-methyl cytosine with phosphorothioate linkage
  modified_base 9: mod_base = OTHER; note = 2'-O-methoxyethyl modified nucleotide with phosphorothioate linkage
  modified_base 10: mod_base = OTHER; note = 2'-O-methoxyethyl modified thymine with phosphorothioate linkage
  modified_base 11: mod_base = OTHER; note = 2'-O-methoxyethyl modified nucleotide with phosphorothioate linkage
  modified_base 12: mod_base = OTHER; note = 2'-O-methoxyethyl modified nucleotide with phosphorothioate linkage
  modified_base 13: mod_base = OTHER; note = 2'-O-methoxyethyl modified thymine with phosphorothioate linkage
  modified_base 14: mod_base = OTHER; note = 2'-O-methoxyethyl modified nucleotide with phosphorothioate linkage
  modified_base 15: mod_base = OTHER; note = 2'-O-methoxyethyl modified 5-methyl cytosine with phosphorothioate linkage
  modified_base 16: mod_base = OTHER; note = 2'-O-methoxyethyl modified thymine with phosphorothioate linkage
  modified_base 17: mod_base = OTHER; note = 2'-O-methoxyethyl modified nucleotide with phosphorothioate linkage
  modified_base 18: mod_base = OTHER; note = 2'-O-methoxyethyl modified nucleotide
  modified_base 19: mod_base = OTHER; note = 2'-O-methoxyethyl modified nucleotide
  modified_base 20: mod_base = OTHER; note = 2'-O-methoxyethyl modified thymine
tcactttcataatgctggat

SEQ ID NO: 310 - RNA, 20 nt, synthetic construct
  source 1..20: mol_type = other RNA
  modified_base 1: mod_base = OTHER; note = 2'-O-methoxyethyl modified thymine with phosphorothioate linkage
  modified_base 2: mod_base = OTHER; note = 2'-O-methoxyethyl modified 5-methyl cytosine with phosphorothioate linkage
  modified_base 3: mod_base = OTHER; note = 2'-O-methoxyethyl modified nucleotide with phosphorothioate linkage
  modified_base 4: mod_base = OTHER; note = 2'-O-methoxyethyl modified 5-methyl cytosine with phosphorothioate linkage
  modified_base 5: mod_base = OTHER; note = 2'-O-methoxyethyl modified thymine with phosphorothioate linkage
  modified_base 6: mod_base = OTHER; note = 2'-O-methoxyethyl modified thymine with phosphorothioate linkage
  modified_base 7: mod_base = OTHER; note = 2'-O-methoxyethyl modified thymine with phosphorothioate linkage
  modified_base 8: mod_base = OTHER; note = 2'-O-methoxyethyl modified 5-methyl cytosine with phosphorothioate linkage
  modified_base 9: mod_base = OTHER; note = 2'-O-methoxyethyl modified nucleotide with phosphorothioate linkage
  modified_base 10: mod_base = OTHER; note = 2'-O-methoxyethyl modified thymine with phosphorothioate linkage
  modified_base 11: mod_base = OTHER; note = 2'-O-methoxyethyl modified nucleotide with phosphorothioate linkage
  modified_base 12: mod_base = OTHER; note = 2'-O-methoxyethyl modified nucleotide with phosphorothioate linkage
  modified_base 13: mod_base = OTHER; note = 2'-O-methoxyethyl modified thymine with phosphorothioate linkage
  modified_base 14: mod_base = OTHER; note = 2'-O-methoxyethyl modified nucleotide with phosphorothioate linkage
  modified_base 15: mod_base = OTHER; note = 2'-O-methoxyethyl modified 5-methyl cytosine with phosphorothioate linkage
  modified_base 16: mod_base = OTHER; note = 2'-O-methoxyethyl modified thymine with phosphorothioate linkage
  modified_base 17: mod_base = OTHER; note = 2'-O-methoxyethyl modified nucleotide with phosphorothioate linkage
  modified_base 18: mod_base = OTHER; note = 2'-O-methoxyethyl modified nucleotide
  modified_base 19: mod_base = OTHER; note = 2'-O-methoxyethyl modified 5-methyl cytosine
  modified_base 20: mod_base = OTHER; note = 2'-O-methoxyethyl modified thymine
tcactttcataatgctggct

SEQ ID NO: 311 - RNA, 20 nt, synthetic construct
  source 1..20: mol_type = other RNA
  modified_base 1: mod_base = OTHER; note = 2'-O-methoxyethyl modified thymine with phosphorothioate linkage
  modified_base 2: mod_base = OTHER; note = 2'-O-methoxyethyl modified 5-methyl cytosine with phosphorothioate linkage
  modified_base 3: mod_base = OTHER; note = 2'-O-methoxyethyl modified nucleotide with phosphorothioate linkage
  modified_base 4: mod_base = OTHER; note = 2'-O-methoxyethyl modified 5-methyl cytosine with phosphorothioate linkage
  modified_base 5: mod_base = OTHER; note = 2'-O-methoxyethyl modified thymine with phosphorothioate linkage
  modified_base 6: mod_base = OTHER; note = 2'-O-methoxyethyl modified thymine with phosphorothioate linkage
  modified_base 7: mod_base = OTHER; note = 2'-O-methoxyethyl modified thymine with phosphorothioate linkage
  modified_base 8: mod_base = OTHER; note = 2'-O-methoxyethyl modified 5-methyl cytosine with phosphorothioate linkage
  modified_base 9: mod_base = OTHER; note = 2'-O-methoxyethyl modified nucleotide with phosphorothioate linkage
  modified_base 10: mod_base = OTHER; note = 2'-O-methoxyethyl modified thymine with phosphorothioate linkage
  modified_base 11: mod_base = OTHER; note = 2'-O-methoxyethyl modified nucleotide with phosphorothioate linkage
  modified_base 12: mod_base = OTHER; note = 2'-O-methoxyethyl modified nucleotide with phosphorothioate linkage
  modified_base 13: mod_base = OTHER; note = 2'-O-methoxyethyl modified thymine with phosphorothioate linkage
  modified_base 14: mod_base = OTHER; note = 2'-O-methoxyethyl modified nucleotide with phosphorothioate linkage
  modified_base 15: mod_base = OTHER; note = 2'-O-methoxyethyl modified 5-methyl cytosine with phosphorothioate linkage
  modified_base 16: mod_base = OTHER; note = 2'-O-methoxyethyl modified thymine with phosphorothioate linkage
  modified_base 17: mod_base = OTHER; note = 2'-O-methoxyethyl modified nucleotide with phosphorothioate linkage
  modified_base 18: mod_base = OTHER; note = 2'-O-methoxyethyl modified nucleotide
  modified_base 19: mod_base = OTHER; note = 2'-O-methoxyethyl modified thymine
  modified_base 20: mod_base = OTHER; note = 2'-O-methoxyethyl modified nucleotide
tcactttcataatgctggta

SEQ ID NO: 312 - RNA, 20 nt, synthetic construct
  source 1..20: mol_type = other RNA
  modified_base 1: mod_base = OTHER; note = 2'-O-methoxyethyl modified thymine with phosphorothioate linkage
  modified_base 2: mod_base = OTHER; note = 2'-O-methoxyethyl modified 5-methyl cytosine with phosphorothioate linkage
  modified_base 3: mod_base = OTHER; note = 2'-O-methoxyethyl modified nucleotide with phosphorothioate linkage
  modified_base 4: mod_base = OTHER; note = 2'-O-methoxyethyl modified 5-methyl cytosine with phosphorothioate linkage
  modified_base 5: mod_base = OTHER; note = 2'-O-methoxyethyl modified thymine with phosphorothioate linkage
  modified_base 6: mod_base = OTHER; note = 2'-O-methoxyethyl modified thymine with phosphorothioate linkage
  modified_base 7: mod_base = OTHER; note = 2'-O-methoxyethyl modified thymine with phosphorothioate linkage
  modified_base 8: mod_base = OTHER; note = 2'-O-methoxyethyl modified 5-methyl cytosine with phosphorothioate linkage
  modified_base 9: mod_base = OTHER; note = 2'-O-methoxyethyl modified nucleotide with phosphorothioate linkage
  modified_base 10: mod_base = OTHER; note = 2'-O-methoxyethyl modified thymine with phosphorothioate linkage
  modified_base 11: mod_base = OTHER; note = 2'-O-methoxyethyl modified nucleotide with phosphorothioate linkage
  modified_base 12: mod_base = OTHER; note = 2'-O-methoxyethyl modified nucleotide with phosphorothioate linkage
  modified_base 13: mod_base = OTHER; note = 2'-O-methoxyethyl modified thymine with phosphorothioate linkage
  modified_base 14: mod_base = OTHER; note = 2'-O-methoxyethyl modified nucleotide with phosphorothioate linkage
  modified_base 15: mod_base = OTHER; note = 2'-O-methoxyethyl modified 5-methyl cytosine with phosphorothioate linkage
  modified_base 16: mod_base = OTHER; note = 2'-O-methoxyethyl modified thymine with phosphorothioate linkage
  modified_base 17: mod_base = OTHER; note = 2'-O-methoxyethyl modified nucleotide with phosphorothioate linkage
  modified_base 18: mod_base = OTHER; note = 2'-O-methoxyethyl modified nucleotide
  modified_base 19: mod_base = OTHER; note = 2'-O-methoxyethyl modified 5-methyl cytosine
  modified_base 20: mod_base = OTHER; note = 2'-O-methoxyethyl modified 5-methyl cytosine
tcactttcataatgctggcc

SEQ ID NO: 313 - RNA, 20 nt, synthetic construct
  source 1..20: mol_type = other RNA
  modified_base 1: mod_base = OTHER; note = 2'-O-methoxyethyl modified thymine with phosphorothioate linkage
  modified_base 2: mod_base = OTHER; note = 2'-O-methoxyethyl modified 5-methyl cytosine with phosphorothioate linkage
  modified_base 3: mod_base = OTHER; note = 2'-O-methoxyethyl modified nucleotide with phosphorothioate linkage
  modified_base 4: mod_base = OTHER; note = 2'-O-methoxyethyl modified 5-methyl cytosine with phosphorothioate linkage
  modified_base 5: mod_base = OTHER; note = 2'-O-methoxyethyl modified thymine with phosphorothioate linkage
  modified_base 6: mod_base = OTHER; note = 2'-O-methoxyethyl modified thymine with phosphorothioate linkage
  modified_base 7: mod_base = OTHER; note = 2'-O-methoxyethyl modified thymine with phosphorothioate linkage
  modified_base 8: mod_base = OTHER; note = 2'-O-methoxyethyl modified 5-methyl cytosine with phosphorothioate linkage
  modified_base 9: mod_base = OTHER; note = 2'-O-methoxyethyl modified nucleotide with phosphorothioate linkage
  modified_base 10: mod_base = OTHER; note = 2'-O-methoxyethyl modified thymine with phosphorothioate linkage
  modified_base 11: mod_base = OTHER; note = 2'-O-methoxyethyl modified nucleotide with phosphorothioate linkage
  modified_base 12: mod_base = OTHER; note = 2'-O-methoxyethyl modified nucleotide with phosphorothioate linkage
  modified_base 13: mod_base = OTHER; note = 2'-O-methoxyethyl modified thymine with phosphorothioate linkage
  modified_base 14: mod_base = OTHER; note = 2'-O-methoxyethyl modified nucleotide with phosphorothioate linkage
  modified_base 15: mod_base = OTHER; note = 2'-O-methoxyethyl modified 5-methyl cytosine with phosphorothioate linkage
  modified_base 16: mod_base = OTHER; note = 2'-O-methoxyethyl modified thymine with phosphorothioate linkage
  modified_base 17: mod_base = OTHER; note = 2'-O-methoxyethyl modified nucleotide with phosphorothioate linkage
  modified_base 18: mod_base = OTHER; note = 2'-O-methoxyethyl modified nucleotide
  modified_base 19: mod_base = OTHER; note = 2'-O-methoxyethyl modified 5-methyl cytosine
  modified_base 20: mod_base = OTHER; note = 2'-O-methoxyethyl modified nucleotide
tcactttcataatgctggca

SEQ ID NO: 314 - DNA, 19 bp, synthetic construct
  source 1..19: mol_type = other DNA
  modified_base 1: mod_base = OTHER; note = 2'-O-N-methyl acetamide modified thymine with phosphorothioate linkage
  modified_base 2: mod_base = OTHER; note = 2'-O-N-methyl acetamide modified 5-methyl cytosine with phosphorothioate linkage
  modified_base 3: mod_base = OTHER; note = 2'-O-N-methyl acetamide modified nucleotide with phosphorothioate linkage
  modified_base 4: mod_base = OTHER; note = 2'-O-N-methyl acetamide modified 5-methyl cytosine with phosphorothioate linkage
  modified_base 5: mod_base = OTHER; note = 2'-O-N-methyl acetamide modified thymine with phosphorothioate linkage
  modified_base 6: mod_base = OTHER; note = 2'-O-N-methyl acetamide modified thymine with phosphorothioate linkage
  modified_base 7: mod_base = OTHER; note = 2'-O-N-methyl acetamide modified thymine with phosphorothioate linkage
  modified_base 8: mod_base = OTHER; note = 2'-O-N-methyl acetamide modified 5-methyl cytosine with phosphorothioate linkage
  modified_base 9: mod_base = OTHER; note = 2'-O-N-methyl acetamide modified nucleotide with phosphorothioate linkage
  modified_base 10: mod_base = OTHER; note = 2'-O-N-methyl acetamide modified thymine with phosphorothioate linkage
  modified_base 11: mod_base = OTHER; note = 2'-O-N-methyl acetamide modified nucleotide with phosphorothioate linkage
  modified_base 12: mod_base = OTHER; note = 2'-O-N-methyl acetamide modified nucleotide with phosphorothioate linkage
  modified_base 13: mod_base = OTHER; note = 2'-O-N-methyl acetamide modified thymine
  modified_base 14: mod_base = OTHER; note = 2'-O-N-methyl acetamide modified nucleotide with phosphorothioate linkage
  modified_base 15: mod_base = OTHER; note = 2'-O-N-methyl acetamide modified 5-methyl cytosine
  modified_base 16: mod_base = OTHER; note = 2'-O-N-methyl acetamide modified thymine with phosphorothioate linkage
  modified_base 17: mod_base = OTHER; note = 2'-O-N-methyl acetamide modified nucleotide with phosphorothioate linkage
  modified_base 18: mod_base = OTHER; note = 2'-O-N-methyl acetamide modified nucleotide
  modified_base 19: mod_base = OTHER; note = 5-methyl cytosine
  misc_feature 1..18: note = RNA
  misc_feature 19: note = DNA
tcactttcataatgctggc

SEQ ID NO: 315 - DNA, 19 bp, synthetic construct
  source 1..19: mol_type = other DNA
  modified_base 1: mod_base = OTHER; note = 2'-O-N-methyl acetamide modified thymine with phosphorothioate linkage
  modified_base 2: mod_base = OTHER; note = 2'-O-N-methyl acetamide modified 5-methyl cytosine with phosphorothioate linkage
  modified_base 3: mod_base = OTHER; note = 2'-O-N-methyl acetamide modified nucleotide with phosphorothioate linkage
  modified_base 4: mod_base = OTHER; note = 2'-O-N-methyl acetamide modified 5-methyl cytosine with phosphorothioate linkage
  modified_base 5: mod_base = OTHER; note = 2'-O-N-methyl acetamide modified thymine with phosphorothioate linkage
  modified_base 6: mod_base = OTHER; note = 2'-O-N-methyl acetamide modified thymine with phosphorothioate linkage
  modified_base 7: mod_base = OTHER; note = 2'-O-N-methyl acetamide modified thymine with phosphorothioate linkage
  modified_base 8: mod_base = OTHER; note = 2'-O-N-methyl acetamide modified 5-methyl cytosine with phosphorothioate linkage
  modified_base 9: mod_base = OTHER; note = 2'-O-N-methyl acetamide modified nucleotide with phosphorothioate linkage
  modified_base 10: mod_base = OTHER; note = 2'-O-N-methyl acetamide modified thymine with phosphorothioate linkage
  modified_base 11: mod_base = OTHER; note = 2'-O-N-methyl acetamide modified nucleotide with phosphorothioate linkage
  modified_base 12: mod_base = OTHER; note = 2'-O-N-methyl acetamide modified nucleotide with phosphorothioate linkage
  modified_base 13: mod_base = OTHER; note = 2'-O-N-methyl acetamide modified thymine
  modified_base 14: mod_base = OTHER; note = 2'-O-N-methyl acetamide modified nucleotide with phosphorothioate linkage
  modified_base 15: mod_base = OTHER; note = 2'-O-N-methyl acetamide modified 5-methyl cytosine
  modified_base 16: mod_base = OTHER; note = 2'-O-N-methyl acetamide modified thymine with phosphorothioate linkage
  modified_base 17: mod_base = OTHER; note = 2'-O-N-methyl acetamide modified nucleotide with phosphorothioate linkage
  modified_base 18: mod_base = OTHER; note = 2'-O-N-methyl acetamide modified nucleotide
  misc_feature 1..18: note = RNA
  misc_feature 19: note = DNA
tcactttcataatgctgga

SEQ ID NO: 316 - RNA, 19 nt, synthetic construct
  source 1..19: mol_type = other RNA
  modified_base 1: mod_base = OTHER; note = 2'-O-N-methyl acetamide modified thymine with phosphorothioate linkage
  modified_base 2: mod_base = OTHER; note = 2'-O-N-methyl acetamide modified 5-methyl cytosine with phosphorothioate linkage
  modified_base 3: mod_base = OTHER; note = 2'-O-N-methyl acetamide modified nucleotide with phosphorothioate linkage
  modified_base 4: mod_base = OTHER; note = 2'-O-N-methyl acetamide modified 5-methyl cytosine with phosphorothioate linkage
  modified_base 5: mod_base = OTHER; note = 2'-O-N-methyl acetamide modified thymine with phosphorothioate linkage
  modified_base 6: mod_base = OTHER; note = 2'-O-N-methyl acetamide modified thymine with phosphorothioate linkage
  modified_base 7: mod_base = OTHER; note = 2'-O-N-methyl acetamide modified thymine with phosphorothioate linkage
  modified_base 8: mod_base = OTHER; note = 2'-O-N-methyl acetamide modified 5-methyl cytosine with phosphorothioate linkage
  modified_base 9: mod_base = OTHER; note = 2'-O-N-methyl acetamide modified nucleotide with phosphorothioate linkage
  modified_base 10: mod_base = OTHER; note = 2'-O-N-methyl acetamide modified thymine with phosphorothioate linkage
  modified_base 11: mod_base = OTHER; note = 2'-O-N-methyl acetamide modified nucleotide with phosphorothioate linkage
  modified_base 12: mod_base = OTHER; note = 2'-O-N-methyl acetamide modified nucleotide with phosphorothioate linkage
  modified_base 13: mod_base = OTHER; note = 2'-O-N-methyl acetamide modified thymine
  modified_base 14: mod_base = OTHER; note = 2'-O-N-methyl acetamide modified nucleotide with phosphorothioate linkage
  modified_base 15: mod_base = OTHER; note = 2'-O-N-methyl acetamide modified 5-methyl cytosine
  modified_base 16: mod_base = OTHER; note = 2'-O-N-methyl acetamide modified thymine with phosphorothioate linkage
  modified_base 17: mod_base = OTHER; note = 2'-O-N-methyl acetamide modified nucleotide with phosphorothioate linkage
  modified_base 18: mod_base = OTHER; note = 2'-O-N-methyl acetamide modified nucleotide
  modified_base 19: mod_base = OTHER; note = 2'-O-methoxyethyl modified nucleotide
tcactttcataatgctgga

SEQ ID NO: 317 - RNA, 19 nt, synthetic construct
  source 1..19: mol_type = other RNA
  modified_base 1: mod_base = OTHER; note = 2'-O-N-methyl acetamide modified thymine with phosphorothioate linkage
  modified_base 2: mod_base = OTHER; note = 2'-O-N-methyl acetamide modified 5-methyl cytosine with phosphorothioate linkage
  modified_base 3: mod_base = OTHER; note = 2'-O-N-methyl acetamide modified nucleotide with phosphorothioate linkage
  modified_base 4: mod_base = OTHER; note = 2'-O-N-methyl acetamide modified 5-methyl cytosine with phosphorothioate linkage
  modified_base 5: mod_base = OTHER; note = 2'-O-N-methyl acetamide modified thymine with phosphorothioate linkage
  modified_base 6: mod_base = OTHER; note = 2'-O-N-methyl acetamide modified thymine with phosphorothioate linkage
  modified_base 7: mod_base = OTHER; note = 2'-O-N-methyl acetamide modified thymine with phosphorothioate linkage
  modified_base 8: mod_base = OTHER; note = 2'-O-N-methyl acetamide modified 5-methyl cytosine with phosphorothioate linkage
  modified_base 9: mod_base = OTHER; note = 2'-O-N-methyl acetamide modified nucleotide with phosphorothioate linkage
  modified_base 10: mod_base = OTHER; note = 2'-O-N-methyl acetamide modified thymine with phosphorothioate linkage
  modified_base 11: mod_base = OTHER; note = 2'-O-N-methyl acetamide modified nucleotide with phosphorothioate linkage
  modified_base 12: mod_base = OTHER; note = 2'-O-N-methyl acetamide modified nucleotide with phosphorothioate linkage
  modified_base 13: mod_base = OTHER; note = 2'-O-N-methyl acetamide modified thymine
  modified_base 14: mod_base = OTHER; note = 2'-O-N-methyl acetamide modified nucleotide with phosphorothioate linkage
  modified_base 15: mod_base = OTHER; note = 2'-O-N-methyl acetamide modified 5-methyl cytosine
  modified_base 16: mod_base = OTHER; note = 2'-O-N-methyl acetamide modified thymine with phosphorothioate linkage
  modified_base 17: mod_base = OTHER; note = 2'-O-N-methyl acetamide modified nucleotide with phosphorothioate linkage
  modified_base 18: mod_base = OTHER; note = 2'-O-N-methyl acetamide modified nucleotide
  modified_base 19: mod_base = OTHER; note = 2'-O-methoxyethyl modified 5-methyl cytosine
tcactttcataatgctggc

SEQ ID NO: 318 - DNA, 19 bp, synthetic construct
  source 1..19: mol_type = other DNA
  modified_base 1: mod_base = OTHER; note = 2'-O-methoxyethyl modified thymine with phosphorothioate linkage
  modified_base 2: mod_base = OTHER; note = 2'-O-methoxyethyl modified 5-methyl cytosine with phosphorothioate linkage
  modified_base 3: mod_base = OTHER; note = 2'-O-methoxyethyl modified nucleotide with phosphorothioate linkage
  modified_base 4: mod_base = OTHER; note = 2'-O-methoxyethyl modified 5-methyl cytosine with phosphorothioate linkage
  modified_base 5: mod_base = OTHER; note = 2'-O-methoxyethyl modified thymine with phosphorothioate linkage
  modified_base 6: mod_base = OTHER; note = 2'-O-methoxyethyl modified thymine with phosphorothioate linkage
  modified_base 7: mod_base = OTHER; note = 2'-O-methoxyethyl modified thymine with phosphorothioate linkage
  modified_base 8: mod_base = OTHER; note = 2'-O-methoxyethyl modified 5-methyl cytosine with phosphorothioate linkage
  modified_base 9: mod_base = OTHER; note = 2'-O-methoxyethyl modified nucleotide with phosphorothioate linkage
  modified_base 10: mod_base = OTHER; note = 2'-O-methoxyethyl modified thymine with phosphorothioate linkage
  modified_base 11: mod_base = OTHER; note = 2'-O-methoxyethyl modified nucleotide with phosphorothioate linkage
  modified_base 12: mod_base = OTHER; note = 2'-O-methoxyethyl modified nucleotide with phosphorothioate linkage
  modified_base 13: mod_base = OTHER; note = 2'-O-methoxyethyl modified thymine
  modified_base 14: mod_base = OTHER; note = 2'-O-methoxyethyl modified nucleotide with phosphorothioate linkage
  modified_base 15: mod_base = OTHER; note = 2'-O-methoxyethyl modified 5-methyl cytosine
  modified_base 16: mod_base = OTHER; note = 2'-O-methoxyethyl modified thymine with phosphorothioate linkage
  modified_base 17: mod_base = OTHER; note = 2'-O-methoxyethyl modified nucleotide with phosphorothioate linkage
  modified_base 18: mod_base = OTHER; note = 2'-O-methoxyethyl modified nucleotide
  modified_base 19: mod_base = OTHER; note = 5-methyl cytosine
  misc_feature 1..18: note = RNA
  misc_feature 19: note = DNA
tcactttcataatgctggc

SEQ ID NO: 319 - DNA, 19 bp, synthetic construct
  source 1..19: mol_type = other DNA
  modified_base 1: mod_base = OTHER; note = 2'-O-methoxyethyl modified thymine with phosphorothioate linkage
  modified_base 2: mod_base = OTHER; note = 2'-O-methoxyethyl modified 5-methyl cytosine with phosphorothioate linkage
  modified_base 3: mod_base = OTHER; note = 2'-O-methoxyethyl modified nucleotide with phosphorothioate linkage
  modified_base 4: mod_base = OTHER; note = 2'-O-methoxyethyl modified 5-methyl cytosine with phosphorothioate linkage
  modified_base 5: mod_base = OTHER; note = 2'-O-methoxyethyl modified thymine with phosphorothioate linkage
  modified_base 6: mod_base = OTHER; note = 2'-O-methoxyethyl modified thymine with phosphorothioate linkage
  modified_base 7: mod_base = OTHER; note = 2'-O-methoxyethyl modified thymine with phosphorothioate linkage
  modified_base 8: mod_base = OTHER; note = 2'-O-methoxyethyl modified 5-methyl cytosine with phosphorothioate linkage
  modified_base 9: mod_base = OTHER; note = 2'-O-methoxyethyl modified nucleotide with phosphorothioate linkage
  modified_base 10: mod_base = OTHER; note = 2'-O-methoxyethyl modified thymine with phosphorothioate linkage
  modified_base 11: mod_base = OTHER; note = 2'-O-methoxyethyl modified nucleotide with phosphorothioate linkage
  modified_base 12: mod_base = OTHER; note = 2'-O-methoxyethyl modified nucleotide with phosphorothioate linkage
  modified_base 13: mod_base = OTHER; note = 2'-O-methoxyethyl modified thymine
  modified_base 14: mod_base = OTHER; note = 2'-O-methoxyethyl modified nucleotide with phosphorothioate linkage
  modified_base 15: mod_base = OTHER; note = 2'-O-methoxyethyl modified 5-methyl cytosine
  modified_base 16: mod_base = OTHER; note = 2'-O-methoxyethyl modified thymine with phosphorothioate linkage
  modified_base 17: mod_base = OTHER; note = 2'-O-methoxyethyl modified nucleotide with phosphorothioate linkage
  modified_base 18: mod_base = OTHER; note = 2'-O-methoxyethyl modified nucleotide
  misc_feature 1..18: note = RNA
  misc_feature 19: note = DNA
tcactttcataatgctgga

SEQ ID NO: 320 - RNA, 19 nt, synthetic construct
  source 1..19: mol_type = other RNA
  modified_base 1: mod_base = OTHER; note = 2'-O-methoxyethyl modified thymine with phosphorothioate linkage
  modified_base 2: mod_base = OTHER; note = 2'-O-methoxyethyl modified 5-methyl cytosine with phosphorothioate linkage
  modified_base 3: mod_base = OTHER; note = 2'-O-methoxyethyl modified nucleotide with phosphorothioate linkage
  modified_base 4: mod_base = OTHER; note = 2'-O-methoxyethyl modified 5-methyl cytosine with phosphorothioate linkage
  modified_base 5: mod_base = OTHER; note = 2'-O-methoxyethyl modified thymine with phosphorothioate linkage
  modified_base 6: mod_base = OTHER; note = 2'-O-methoxyethyl modified thymine with phosphorothioate linkage
  modified_base 7: mod_base = OTHER; note = 2'-O-methoxyethyl modified thymine with phosphorothioate linkage
  modified_base 8: mod_base = OTHER; note = 2'-O-methoxyethyl modified 5-methyl cytosine with phosphorothioate linkage
  modified_base 9: mod_base = OTHER; note = 2'-O-methoxyethyl modified nucleotide with phosphorothioate linkage
  modified_base 10: mod_base = OTHER; note = 2'-O-methoxyethyl modified thymine with phosphorothioate linkage
  modified_base 11: mod_base = OTHER; note = 2'-O-methoxyethyl modified nucleotide with phosphorothioate linkage
  modified_base 12: mod_base = OTHER; note = 2'-O-methoxyethyl modified nucleotide with phosphorothioate linkage
  modified_base 13: mod_base = OTHER; note = 2'-O-methoxyethyl modified thymine
  modified_base 14: mod_base = OTHER; note = 2'-O-methoxyethyl modified nucleotide with phosphorothioate linkage
  modified_base 15: mod_base = OTHER; note = 2'-O-methoxyethyl modified 5-methyl cytosine
  modified_base 16: mod_base = OTHER; note = 2'-O-methoxyethyl modified thymine with phosphorothioate linkage
  modified_base 17: mod_base = OTHER; note = 2'-O-methoxyethyl modified nucleotide with phosphorothioate linkage
  modified_base 18: mod_base = OTHER; note = 2'-O-methoxyethyl modified nucleotide
  modified_base 19: mod_base = OTHER; note = 2'-O-methoxyethyl modified nucleotide
tcactttcataatgctgga

SEQ ID NO: 321 - RNA, 19 nt, synthetic construct
  source 1..19: mol_type = other RNA
  modified_base 1: mod_base = OTHER; note = 2'-O-methoxyethyl modified thymine with phosphorothioate linkage
  modified_base 2: mod_base = OTHER; note = 2'-O-methoxyethyl modified 5-methyl cytosine with phosphorothioate linkage
  modified_base 3: mod_base = OTHER; note = 2'-O-methoxyethyl modified nucleotide with phosphorothioate linkage
  modified_base 4: mod_base = OTHER; note = 2'-O-methoxyethyl modified 5-methyl cytosine with phosphorothioate linkage
  modified_base 5: mod_base = OTHER; note = 2'-O-methoxyethyl modified thymine with phosphorothioate linkage
  modified_base 6: mod_base = OTHER; note = 2'-O-methoxyethyl modified thymine with phosphorothioate linkage
  modified_base 7: mod_base = OTHER; note = 2'-O-methoxyethyl modified thymine with phosphorothioate linkage
  modified_base 8: mod_base = OTHER; note = 2'-O-methoxyethyl modified 5-methyl cytosine with phosphorothioate linkage
  modified_base 9: mod_base = OTHER; note = 2'-O-methoxyethyl modified nucleotide with phosphorothioate linkage
  modified_base 10: mod_base = OTHER; note = 2'-O-methoxyethyl modified thymine with phosphorothioate linkage
  modified_base 11: mod_base = OTHER; note = 2'-O-methoxyethyl modified nucleotide with phosphorothioate linkage
  modified_base 12: mod_base = OTHER; note = 2'-O-methoxyethyl modified nucleotide with phosphorothioate linkage
  modified_base 13: mod_base = OTHER; note = 2'-O-methoxyethyl modified thymine
  modified_base 14: mod_base = OTHER; note = 2'-O-methoxyethyl modified nucleotide with phosphorothioate linkage
  modified_base 15: mod_base = OTHER; note = 2'-O-methoxyethyl modified 5-methyl cytosine
  modified_base 16: mod_base = OTHER; note = 2'-O-methoxyethyl modified thymine with phosphorothioate linkage
  modified_base 17: mod_base = OTHER; note = 2'-O-methoxyethyl modified nucleotide with phosphorothioate linkage
  modified_base 18: mod_base = OTHER; note = 2'-O-methoxyethyl modified nucleotide
  modified_base 19: mod_base = OTHER; note = 2'-O-methoxyethyl modified 5-methyl cytosine
tcactttcataatgctggc

SEQ ID NO: 322 - DNA, 19 bp, synthetic construct
  source 1..19: mol_type = other DNA
  modified_base 1: mod_base = OTHER; note = 2'-O-N-methyl acetamide modified thymine with phosphorothioate linkage
  modified_base 2: mod_base = OTHER; note = 2'-O-N-methyl acetamide modified 5-methyl cytosine with phosphorothioate linkage
  modified_base 3: mod_base = OTHER; note = 2'-O-N-methyl acetamide modified nucleotide with phosphorothioate linkage
  modified_base 4: mod_base = OTHER; note = 2'-O-N-methyl acetamide modified 5-methyl cytosine with phosphorothioate linkage
  modified_base 5: mod_base = OTHER; note = 2'-O-N-methyl acetamide modified thymine with phosphorothioate linkage
  modified_base 6: mod_base = OTHER; note = 2'-O-N-methyl acetamide modified thymine with phosphorothioate linkage
  modified_base 7: mod_base = OTHER; note = 2'-O-N-methyl acetamide modified thymine with phosphorothioate linkage
  modified_base 8: mod_base = OTHER; note = 2'-O-N-methyl acetamide modified 5-methyl cytosine with phosphorothioate linkage
  modified_base 9: mod_base = OTHER; note = 2'-O-N-methyl acetamide modified nucleotide with phosphorothioate linkage
  modified_base 10: mod_base = OTHER; note = 2'-O-N-methyl acetamide modified thymine with phosphorothioate linkage
  modified_base 11: mod_base = OTHER; note = 2'-O-N-methyl acetamide modified nucleotide with phosphorothioate linkage
  modified_base 12: mod_base = OTHER; note = 2'-O-N-methyl acetamide modified nucleotide with phosphorothioate linkage
  modified_base 13: mod_base = OTHER; note = 2'-O-N-methyl acetamide modified thymine with phosphorothioate linkage
  modified_base 14: mod_base = OTHER; note = 2'-O-N-methyl acetamide modified nucleotide with phosphorothioate linkage
  modified_base 15: mod_base = OTHER; note = 2'-O-N-methyl acetamide modified 5-methyl cytosine
  modified_base 16: mod_base = OTHER; note = 2'-O-N-methyl acetamide modified thymine with phosphorothioate linkage
  modified_base 17: mod_base = OTHER; note = 2'-O-N-methyl acetamide modified nucleotide with phosphorothioate linkage
  modified_base 18: mod_base = OTHER; note = 2'-O-N-methyl acetamide modified nucleotide
  misc_feature 1..18: note = RNA
  misc_feature 19: note = DNA
tcactttcataatgctgga

SEQ ID NO: 323 - DNA, 19 bp, synthetic construct
  source 1..19: mol_type = other DNA
  modified_base 1: mod_base = OTHER; note = 2'-O-N-methyl acetamide modified thymine with phosphorothioate linkage
  modified_base 2: mod_base = OTHER; note = 2'-O-N-methyl acetamide modified 5-methyl cytosine with phosphorothioate linkage
  modified_base 3: mod_base = OTHER; note = 2'-O-N-methyl acetamide modified nucleotide with phosphorothioate linkage
  modified_base 4: mod_base = OTHER; note = 2'-O-N-methyl acetamide modified 5-methyl cytosine with phosphorothioate linkage
  modified_base 5: mod_base = OTHER; note = 2'-O-N-methyl acetamide modified thymine with phosphorothioate linkage
  modified_base 6: mod_base = OTHER; note = 2'-O-N-methyl acetamide modified thymine with phosphorothioate linkage
  modified_base 7: mod_base = OTHER; note = 2'-O-N-methyl acetamide modified thymine with phosphorothioate linkage
  modified_base 8: mod_base = OTHER; note = 2'-O-N-methyl acetamide modified 5-methyl cytosine with phosphorothioate linkage
  modified_base 9: mod_base = OTHER; note = 2'-O-N-methyl acetamide modified nucleotide with phosphorothioate linkage
  modified_base 10: mod_base = OTHER; note = 2'-O-N-methyl acetamide modified thymine with phosphorothioate linkage
  modified_base 11: mod_base = OTHER; note = 2'-O-N-methyl acetamide modified nucleotide with phosphorothioate linkage
  modified_base 12: mod_base = OTHER; note = 2'-O-N-methyl acetamide modified nucleotide with phosphorothioate linkage
  modified_base 13: mod_base = OTHER; note = 2'-O-N-methyl acetamide modified thymine with phosphorothioate linkage
  modified_base 14: mod_base = OTHER; note = 2'-O-N-methyl acetamide modified nucleotide with phosphorothioate linkage
  modified_base 15: mod_base = OTHER; note = 2'-O-N-methyl acetamide modified 5-methyl cytosine
  modified_base 16: mod_base = OTHER; note = 2'-O-N-methyl acetamide modified thymine with phosphorothioate linkage
  modified_base 17: mod_base = OTHER; note = 2'-O-N-methyl acetamide modified nucleotide with phosphorothioate linkage
  modified_base 18: mod_base = OTHER; note = 2'-O-N-methyl acetamide modified nucleotide
  modified_base 19: mod_base = OTHER; note = 5-methyl cytosine
  misc_feature 1..18: note = RNA
  misc_feature 19: note = DNA
tcactttcataatgctggc

SEQ ID NO: 324 - RNA, 19 nt, synthetic construct
  source 1..19: mol_type = other RNA
  modified_base 1: mod_base = OTHER; note = 2'-O-N-methyl acetamide modified thymine with phosphorothioate linkage
  modified_base 2: mod_base = OTHER; note = 2'-O-N-methyl acetamide modified 5-methyl cytosine with phosphorothioate linkage
  modified_base 3: mod_base = OTHER; note = 2'-O-N-methyl acetamide modified nucleotide with phosphorothioate linkage
  modified_base 4: mod_base = OTHER; note = 2'-O-N-methyl acetamide modified 5-methyl cytosine with phosphorothioate linkage
  modified_base 5: mod_base = OTHER; note = 2'-O-N-methyl acetamide modified thymine with phosphorothioate linkage
  modified_base 6: mod_base = OTHER; note = 2'-O-N-methyl acetamide modified thymine with phosphorothioate linkage
  modified_base 7: mod_base = OTHER; note = 2'-O-N-methyl acetamide modified thymine with phosphorothioate linkage
  modified_base 8: mod_base = OTHER; note = 2'-O-N-methyl acetamide modified 5-methyl cytosine with phosphorothioate linkage
  modified_base 9: mod_base = OTHER; note = 2'-O-N-methyl acetamide modified nucleotide with phosphorothioate linkage
  modified_base 10: mod_base = OTHER; note = 2'-O-N-methyl acetamide modified thymine with phosphorothioate linkage
  modified_base 11: mod_base = OTHER; note = 2'-O-N-methyl acetamide modified nucleotide with phosphorothioate linkage
  modified_base 12: mod_base = OTHER; note = 2'-O-N-methyl acetamide modified nucleotide with phosphorothioate linkage
  modified_base 13: mod_base = OTHER; note = 2'-O-N-methyl acetamide modified thymine with phosphorothioate linkage
  modified_base 14: mod_base = OTHER; note = 2'-O-N-methyl acetamide modified nucleotide with phosphorothioate linkage
  modified_base 15: mod_base = OTHER; note = 2'-O-N-methyl acetamide modified 5-methyl cytosine
  modified_base 16: mod_base = OTHER; note = 2'-O-N-methyl acetamide modified thymine with phosphorothioate linkage
  modified_base 17: mod_base = OTHER; note = 2'-O-N-methyl acetamide modified nucleotide with phosphorothioate linkage
  modified_base 18: mod_base = OTHER; note = 2'-O-N-methyl acetamide modified nucleotide
  modified_base 19: mod_base = OTHER; note = 2'-O-methoxyethyl modified nucleotide
tcactttcataatgctgga

SEQ ID NO: 325 - RNA, 19 nt, synthetic construct
  source 1..19: mol_type = other RNA
  modified_base 1: mod_base = OTHER; note = 2'-O-N-methyl acetamide modified thymine with phosphorothioate linkage
  modified_base 2: mod_base = OTHER; note = 2'-O-N-methyl acetamide modified 5-methyl cytosine with phosphorothioate linkage
  modified_base 3: mod_base = OTHER; note = 2'-O-N-methyl acetamide modified nucleotide with phosphorothioate linkage
  modified_base 4: mod_base = OTHER; note = 2'-O-N-methyl acetamide modified 5-methyl cytosine with phosphorothioate linkage
  modified_base 5: mod_base = OTHER; note = 2'-O-N-methyl acetamide modified thymine with phosphorothioate linkage
  modified_base 6: mod_base = OTHER; note = 2'-O-N-methyl acetamide modified thymine with phosphorothioate linkage
  modified_base 7: mod_base = OTHER; note = 2'-O-N-methyl acetamide modified thymine with phosphorothioate linkage
  modified_base 8: mod_base = OTHER; note = 2'-O-N-methyl acetamide modified 5-methyl cytosine with phosphorothioate linkage
  modified_base 9: mod_base = OTHER; note = 2'-O-N-methyl acetamide modified nucleotide with phosphorothioate linkage
  modified_base 10: mod_base = OTHER; note = 2'-O-N-methyl acetamide modified thymine with phosphorothioate linkage
  modified_base 11: mod_base = OTHER; note = 2'-O-N-methyl acetamide modified nucleotide with phosphorothioate linkage
  modified_base 12: mod_base = OTHER; note = 2'-O-N-methyl acetamide modified nucleotide with phosphorothioate linkage
  modified_base 13: mod_base = OTHER; note = 2'-O-N-methyl acetamide modified thymine with phosphorothioate linkage
  modified_base 14: mod_base = OTHER; note = 2'-O-N-methyl acetamide modified nucleotide with phosphorothioate linkage
  modified_base 15: mod_base = OTHER; note = 2'-O-N-methyl acetamide modified 5-methyl cytosine
  modified_base 16: mod_base = OTHER; note = 2'-O-N-methyl acetamide modified thymine with phosphorothioate linkage
  modified_base 17: mod_base = OTHER; note = 2'-O-N-methyl acetamide modified nucleotide with phosphorothioate linkage
  modified_base 18: mod_base = OTHER; note = 2'-O-N-methyl acetamide modified nucleotide
  modified_base 19: mod_base = OTHER; note = 2'-O-methoxyethyl modified 5-methyl cytosine
tcactttcataatgctggc

SEQ ID NO: 326 - DNA, 19 bp, synthetic construct
  source 1..19: mol_type = other DNA
  modified_base 1: mod_base = OTHER; note = 2'-O-methoxyethyl modified thymine with phosphorothioate linkage
  modified_base 2: mod_base = OTHER; note = 2'-O-methoxyethyl modified 5-methyl cytosine with phosphorothioate linkage
  modified_base 3: mod_base = OTHER; note = 2'-O-methoxyethyl modified nucleotide with phosphorothioate linkage
  modified_base 4: mod_base = OTHER; note = 2'-O-methoxyethyl modified 5-methyl cytosine with phosphorothioate linkage
  modified_base 5: mod_base = OTHER; note = 2'-O-methoxyethyl modified thymine with phosphorothioate linkage
  modified_base 6: mod_base = OTHER; note = 2'-O-methoxyethyl modified thymine with phosphorothioate linkage
  modified_base 7: mod_base = OTHER; note = 2'-O-methoxyethyl modified thymine with phosphorothioate linkage
  modified_base 8: mod_base = OTHER; note = 2'-O-methoxyethyl modified 5-methyl cytosine with phosphorothioate linkage
  modified_base 9: mod_base = OTHER; note = 2'-O-methoxyethyl modified nucleotide with phosphorothioate linkage
  modified_base 10: mod_base = OTHER; note = 2'-O-methoxyethyl modified thymine with phosphorothioate linkage
  modified_base 11: mod_base = OTHER; note = 2'-O-methoxyethyl modified nucleotide with phosphorothioate linkage
  modified_base 12: mod_base = OTHER; note = 2'-O-methoxyethyl modified nucleotide with phosphorothioate linkage
  modified_base 13: mod_base = OTHER; note = 2'-O-methoxyethyl modified thymine with phosphorothioate linkage
  modified_base 14: mod_base = OTHER; note = 2'-O-methoxyethyl modified nucleotide with phosphorothioate linkage
  modified_base 15: mod_base = OTHER; note = 2'-O-methoxyethyl modified 5-methyl cytosine
  modified_base 16: mod_base = OTHER; note = 2'-O-methoxyethyl modified thymine with phosphorothioate linkage
  modified_base 17: mod_base = OTHER; note = 2'-O-methoxyethyl modified nucleotide with phosphorothioate linkage
  modified_base 18: mod_base = OTHER; note = 2'-O-methoxyethyl modified nucleotide
  misc_feature 1..18: note = RNA
  misc_feature 19: note = DNA
tcactttcataatgctgga

SEQ ID NO: 327 - DNA, 19 bp, synthetic construct
  source 1..19: mol_type = other DNA
  modified_base 1: mod_base = OTHER; note = 2'-O-methoxyethyl modified thymine with phosphorothioate linkage
  modified_base 2: mod_base = OTHER; note = 2'-O-methoxyethyl modified 5-methyl cytosine with phosphorothioate linkage
  modified_base 3: mod_base = OTHER; note = 2'-O-methoxyethyl modified nucleotide with phosphorothioate linkage
  modified_base 4: mod_base = OTHER; note = 2'-O-methoxyethyl modified 5-methyl cytosine with phosphorothioate linkage
  modified_base 5: mod_base = OTHER; note = 2'-O-methoxyethyl modified thymine with phosphorothioate linkage
  modified_base 6: mod_base = OTHER; note = 2'-O-methoxyethyl modified thymine with phosphorothioate linkage
  modified_base 7: mod_base = OTHER; note = 2'-O-methoxyethyl modified thymine with phosphorothioate linkage
  modified_base 8: mod_base = OTHER; note = 2'-O-methoxyethyl modified 5-methyl cytosine with phosphorothioate linkage
  modified_base 9: mod_base = OTHER; note = 2'-O-methoxyethyl modified nucleotide with phosphorothioate linkage
  modified_base 10: mod_base = OTHER; note = 2'-O-methoxyethyl modified thymine with phosphorothioate linkage
  modified_base 11: mod_base = OTHER; note = 2'-O-methoxyethyl modified nucleotide with phosphorothioate linkage
  modified_base 12: mod_base = OTHER; note = 2'-O-methoxyethyl modified nucleotide with phosphorothioate linkage
  modified_base 13: mod_base = OTHER; note = 2'-O-methoxyethyl modified thymine with phosphorothioate linkage
  modified_base 14: mod_base = OTHER; note = 2'-O-methoxyethyl modified nucleotide with phosphorothioate linkage
  modified_base 15: mod_base = OTHER; note = 2'-O-methoxyethyl modified 5-methyl cytosine
  modified_base 16: mod_base = OTHER; note = 2'-O-methoxyethyl modified thymine with phosphorothioate linkage
  modified_base 17: mod_base = OTHER; note = 2'-O-methoxyethyl modified nucleotide with phosphorothioate linkage
  modified_base 18: mod_base = OTHER; note = 2'-O-methoxyethyl modified nucleotide
  modified_base 19: mod_base = OTHER; note = 5-methyl cytosine
  misc_feature 1..18: note = RNA
  misc_feature 19: note = DNA
tcactttcataatgctggc

SEQ ID NO: 328 - RNA, 19 nt, synthetic construct
  source 1..19: mol_type = other RNA
  modified_base 1: mod_base = OTHER; note = 2'-O-methoxyethyl modified thymine with phosphorothioate linkage
  modified_base 2: mod_base = OTHER; note = 2'-O-methoxyethyl modified 5-methyl cytosine with phosphorothioate linkage
  modified_base 3: mod_base = OTHER; note = 2'-O-methoxyethyl modified nucleotide with phosphorothioate linkage
  modified_base 4: mod_base = OTHER; note = 2'-O-methoxyethyl modified 5-methyl cytosine with phosphorothioate linkage
  modified_base 5: mod_base = OTHER; note = 2'-O-methoxyethyl modified thymine with phosphorothioate linkage
  modified_base 6: mod_base = OTHER; note = 2'-O-methoxyethyl modified thymine with phosphorothioate linkage
  modified_base 7: mod_base = OTHER; note = 2'-O-methoxyethyl modified thymine with phosphorothioate linkage
  modified_base 8: mod_base = OTHER; note = 2'-O-methoxyethyl modified 5-methyl cytosine with phosphorothioate linkage
  modified_base 9: mod_base = OTHER; note = 2'-O-methoxyethyl modified nucleotide with phosphorothioate linkage
  modified_base 10: mod_base = OTHER; note = 2'-O-methoxyethyl modified thymine with phosphorothioate linkage
  modified_base 11: mod_base = OTHER; note = 2'-O-methoxyethyl modified nucleotide with phosphorothioate linkage
  modified_base 12: mod_base = OTHER; note = 2'-O-methoxyethyl modified nucleotide with phosphorothioate linkage
  modified_base 13: mod_base = OTHER; note = 2'-O-methoxyethyl modified thymine with phosphorothioate linkage
  modified_base 14: mod_base = OTHER; note = 2'-O-methoxyethyl modified nucleotide with phosphorothioate linkage
  modified_base 15: mod_base = OTHER; note = 2'-O-methoxyethyl modified 5-methyl cytosine
  modified_base 16: mod_base = OTHER; note = 2'-O-methoxyethyl modified thymine with phosphorothioate linkage
  modified_base 17: mod_base = OTHER; note = 2'-O-methoxyethyl modified nucleotide with phosphorothioate linkage
  modified_base 18: mod_base = OTHER; note = 2'-O-methoxyethyl modified nucleotide
  modified_base 19: mod_base = OTHER; note = 2'-O-methoxyethyl modified nucleotide
tcactttcataatgctgga

SEQ ID NO: 329 - RNA, 19 nt, synthetic construct
  source 1..19: mol_type = other RNA
  modified_base 1: mod_base = OTHER; note = 2'-O-methoxyethyl modified thymine with phosphorothioate linkage
  modified_base 2: mod_base = OTHER; note = 2'-O-methoxyethyl modified 5-methyl cytosine with phosphorothioate linkage
  modified_base 3: mod_base = OTHER; note = 2'-O-methoxyethyl modified nucleotide with phosphorothioate linkage
  modified_base 4: mod_base = OTHER; note = 2'-O-methoxyethyl modified 5-methyl cytosine with phosphorothioate linkage
  modified_base 5: mod_base = OTHER; note = 2'-O-methoxyethyl modified thymine with phosphorothioate linkage
  modified_base 6: mod_base = OTHER; note = 2'-O-methoxyethyl modified thymine with phosphorothioate linkage
  modified_base 7: mod_base = OTHER; note = 2'-O-methoxyethyl modified thymine with phosphorothioate linkage
  modified_base 8: mod_base = OTHER; note = 2'-O-methoxyethyl modified 5-methyl cytosine with phosphorothioate linkage
  modified_base 9: mod_base = OTHER; note = 2'-O-methoxyethyl modified nucleotide with phosphorothioate linkage
  modified_base 10: mod_base = OTHER; note = 2'-O-methoxyethyl modified thymine with phosphorothioate linkage
  modified_base 11: mod_base = OTHER; note = 2'-O-methoxyethyl modified nucleotide with phosphorothioate linkage
  modified_base 12: mod_base = OTHER; note = 2'-O-methoxyethyl modified nucleotide with phosphorothioate linkage
  modified_base 13: mod_base = OTHER; note = 2'-O-methoxyethyl modified thymine with phosphorothioate linkage
  modified_base 14: mod_base = OTHER; note = 2'-O-methoxyethyl modified nucleotide with phosphorothioate linkage
  modified_base 15: mod_base = OTHER; note = 2'-O-methoxyethyl modified 5-methyl cytosine
  modified_base 16: mod_base = OTHER; note = 2'-O-methoxyethyl modified thymine with phosphorothioate linkage
  modified_base 17: mod_base = OTHER; note = 2'-O-methoxyethyl modified nucleotide with phosphorothioate linkage
  modified_base 18: mod_base = OTHER; note = 2'-O-methoxyethyl modified nucleotide
  modified_base 19: mod_base = OTHER; note = 2'-O-methoxyethyl modified 5-methyl cytosine
tcactttcataatgctggc

SEQ ID NO: 330 - RNA, 19 nt, synthetic construct
  source 1..19: mol_type = other RNA
  modified_base 1: mod_base = OTHER; note = 2'-O-methoxyethyl modified thymine
  modified_base 2: mod_base = OTHER; note = 2'-O-N-methyl acetamide modified thymine with phosphorothioate linkage
  modified_base 3: mod_base = OTHER; note = 2'-O-N-methyl acetamide modified 5-methyl cytosine with phosphorothioate linkage
  modified_base 4: mod_base = OTHER; note = 2'-O-N-methyl acetamide modified nucleotide with phosphorothioate linkage
  modified_base 5: mod_base = OTHER; note = 2'-O-N-methyl acetamide modified 5-methyl cytosine with phosphorothioate linkage
  modified_base 6: mod_base = OTHER; note = 2'-O-N-methyl acetamide modified thymine with phosphorothioate linkage
  modified_base 7: mod_base = OTHER; note = 2'-O-N-methyl acetamide modified thymine with phosphorothioate linkage
  modified_base 8: mod_base = OTHER; note = 2'-O-N-methyl acetamide modified thymine with phosphorothioate linkage
  modified_base 9: mod_base = OTHER; note = 2'-O-N-methyl acetamide modified 5-methyl cytosine with phosphorothioate linkage
  modified_base 10: mod_base = OTHER; note = 2'-O-N-methyl acetamide modified nucleotide with phosphorothioate linkage
  modified_base 11: mod_base = OTHER; note = 2'-O-N-methyl acetamide modified thymine with phosphorothioate linkage
  modified_base 12: mod_base = OTHER; note = 2'-O-N-methyl acetamide modified nucleotide with phosphorothioate linkage
  modified_base 13: mod_base = OTHER; note = 2'-O-N-methyl acetamide modified nucleotide with phosphorothioate linkage
  modified_base 14: mod_base = OTHER; note = 2'-O-N-methyl acetamide modified thymine with phosphorothioate linkage
  modified_base 15: mod_base = OTHER; note = 2'-O-N-methyl acetamide modified nucleotide with phosphorothioate linkage
  modified_base 16: mod_base = OTHER; note = 2'-O-N-methyl acetamide modified 5-methyl cytosine with phosphorothioate linkage
  modified_base 17: mod_base = OTHER; note = 2'-O-N-methyl acetamide modified thymine with phosphorothioate linkage
  modified_base 18: mod_base = OTHER; note = 2'-O-N-methyl acetamide modified nucleotide with phosphorothioate linkage
  modified_base 19: mod_base = OTHER; note = 2'-O-N-methyl acetamide modified nucleotide
ttcactttcataatgctgg

SEQ ID NO: 331 - RNA, 19 nt, synthetic construct
  source 1..19: mol_type = other RNA
  modified_base 1: mod_base = OTHER; note = 2'-O-methoxyethyl modified 5-methyl cytosine
  modified_base 2: mod_base = OTHER; note = 2'-O-methoxyethyl modified thymine with phosphorothioate linkage
  modified_base 3: mod_base = OTHER; note = 2'-O-methoxyethyl modified 5-methyl cytosine with phosphorothioate linkage
  modified_base 4: mod_base = OTHER; note = 2'-O-methoxyethyl modified nucleotide with phosphorothioate linkage
  modified_base 5: mod_base = OTHER; note = 2'-O-methoxyethyl modified 5-methyl cytosine with phosphorothioate linkage
  modified_base 6: mod_base = OTHER; note = 2'-O-methoxyethyl modified thymine with phosphorothioate linkage
  modified_base 7: mod_base = OTHER; note = 2'-O-methoxyethyl modified thymine with phosphorothioate linkage
  modified_base 8: mod_base = OTHER; note = 2'-O-methoxyethyl modified thymine with phosphorothioate linkage
  modified_base 9: mod_base = OTHER; note = 2'-O-methoxyethyl modified 5-methyl cytosine with phosphorothioate linkage
  modified_base 10: mod_base = OTHER; note = 2'-O-methoxyethyl modified nucleotide with phosphorothioate linkage
  modified_base 11: mod_base = OTHER; note = 2'-O-methoxyethyl modified thymine with phosphorothioate linkage
  modified_base 12: mod_base = OTHER; note = 2'-O-methoxyethyl modified nucleotide with phosphorothioate linkage
  modified_base 13: mod_base = OTHER; note = 2'-O-methoxyethyl modified nucleotide with phosphorothioate linkage
  modified_base 14: mod_base = OTHER; note = 2'-O-methoxyethyl modified thymine with phosphorothioate linkage
  modified_base 15: mod_base = OTHER; note = 2'-O-methoxyethyl modified nucleotide with phosphorothioate linkage
  modified_base 16: mod_base = OTHER; note = 2'-O-methoxyethyl modified 5-methyl cytosine with phosphorothioate linkage
  modified_base 17: mod_base = OTHER; note = 2'-O-methoxyethyl modified thymine with phosphorothioate linkage
  modified_base 18: mod_base = OTHER; note = 2'-O-methoxyethyl modified nucleotide with phosphorothioate linkage
  modified_base 19: mod_base = OTHER; note = 2'-O-methoxyethyl modified nucleotide
ctcactttcataatgctgg

SEQ ID NO: 332 - RNA, 19 nt, synthetic construct
  source 1..19: mol_type = other RNA
  modified_base 1: mod_base = OTHER; note = 2'-O-methoxyethyl modified nucleotide
  modified_base 2: mod_base = OTHER; note = 2'-O-methoxyethyl modified thymine with phosphorothioate linkage
  modified_base 3: mod_base = OTHER; note = 2'-O-methoxyethyl modified 5-methyl cytosine with phosphorothioate linkage
  modified_base 4: mod_base = OTHER; note = 2'-O-methoxyethyl modified nucleotide with phosphorothioate linkage
  modified_base 5: mod_base = OTHER; note = 2'-O-methoxyethyl modified 5-methyl cytosine with phosphorothioate linkage
  modified_base 6: mod_base = OTHER; note = 2'-O-methoxyethyl modified thymine with phosphorothioate linkage
  modified_base 7: mod_base = OTHER; note = 2'-O-methoxyethyl modified thymine with phosphorothioate linkage
  modified_base 8: mod_base = OTHER; note = 2'-O-methoxyethyl modified thymine with phosphorothioate linkage
  modified_base 9: mod_base = OTHER; note = 2'-O-methoxyethyl modified 5-methyl cytosine with phosphorothioate linkage
  modified_base 10: mod_base = OTHER; note = 2'-O-methoxyethyl modified nucleotide with phosphorothioate linkage
  modified_base 11: mod_base = OTHER; note = 2'-O-methoxyethyl modified thymine with phosphorothioate linkage
  modified_base 12: mod_base = OTHER; note = 2'-O-methoxyethyl modified nucleotide with phosphorothioate linkage
  modified_base 13: mod_base = OTHER; note = 2'-O-methoxyethyl modified nucleotide with phosphorothioate linkage
  modified_base 14: mod_base = OTHER; note = 2'-O-methoxyethyl modified thymine with phosphorothioate linkage
  modified_base 15: mod_base = OTHER; note = 2'-O-methoxyethyl modified nucleotide with phosphorothioate linkage
  modified_base 16: mod_base = OTHER; note = 2'-O-methoxyethyl modified 5-methyl cytosine with phosphorothioate linkage
  modified_base 17: mod_base = OTHER; note = 2'-O-methoxyethyl modified thymine with phosphorothioate linkage
  modified_base 18: mod_base = OTHER; note = 2'-O-methoxyethyl modified nucleotide with phosphorothioate linkage
  modified_base 19: mod_base = OTHER; note = 2'-O-methoxyethyl modified nucleotide
atcactttcataatgctgg

SEQ ID NO: 333 - RNA, 19 nt, synthetic construct
  source 1..19: mol_type = other RNA
  modified_base 1: mod_base = OTHER; note = 2'-O-methoxyethyl modified thymine
  modified_base 2: mod_base = OTHER; note = 2'-O-methoxyethyl modified thymine with phosphorothioate linkage
  modified_base 3: mod_base = OTHER; note = 2'-O-methoxyethyl modified 5-methyl cytosine with phosphorothioate linkage
  modified_base 4: mod_base = OTHER; note = 2'-O-methoxyethyl modified nucleotide with phosphorothioate linkage
  modified_base 5: mod_base = OTHER; note = 2'-O-methoxyethyl modified 5-methyl cytosine with phosphorothioate linkage
  modified_base 6: mod_base = OTHER; note = 2'-O-methoxyethyl modified thymine with phosphorothioate linkage
  modified_base 7: mod_base = OTHER; note = 2'-O-methoxyethyl modified thymine with phosphorothioate linkage
  modified_base 8: mod_base = OTHER; note = 2'-O-methoxyethyl modified thymine with phosphorothioate linkage
  modified_base 9: mod_base = OTHER; note = 2'-O-methoxyethyl modified 5-methyl cytosine with phosphorothioate linkage
  modified_base 10: mod_base = OTHER; note = 2'-O-methoxyethyl modified nucleotide with phosphorothioate linkage
  modified_base 11: mod_base = OTHER; note = 2'-O-methoxyethyl modified thymine with phosphorothioate linkage
  modified_base 12: mod_base = OTHER; note = 2'-O-methoxyethyl modified nucleotide with phosphorothioate linkage
  modified_base 13: mod_base = OTHER; note = 2'-O-methoxyethyl modified nucleotide with phosphorothioate linkage
  modified_base 14: mod_base = OTHER; note = 2'-O-methoxyethyl modified thymine with phosphorothioate linkage
  modified_base 15: mod_base = OTHER; note = 2'-O-methoxyethyl modified nucleotide with phosphorothioate linkage
  modified_base 16: mod_base = OTHER; note = 2'-O-methoxyethyl modified 5-methyl cytosine with phosphorothioate linkage
  modified_base 17: mod_base = OTHER; note = 2'-O-methoxyethyl modified thymine with phosphorothioate linkage
  modified_base 18: mod_base = OTHER; note = 2'-O-methoxyethyl modified nucleotide with phosphorothioate linkage
  modified_base 19: mod_base = OTHER; note = 2'-O-methoxyethyl modified nucleotide
ttcactttcataatgctgg

SEQ ID NO: 334 - RNA, 18 nt, synthetic construct
  source 1..18: mol_type = other RNA
  modified_base 1: mod_base = OTHER; note = 2'-O-methoxyethyl modified thymine with phosphorothioate linkage
  modified_base 2: mod_base = OTHER; note = 2'-O-methoxyethyl modified 5-methyl cytosine with phosphorothioate linkage
  modified_base 3: mod_base = OTHER; note = 2'-O-methoxyethyl modified nucleotide
  modified_base 4: mod_base = OTHER; note = 2'-O-methoxyethyl modified 5-methyl cytosine
  modified_base 5: mod_base = OTHER; note = 2'-O-methoxyethyl modified thymine
  modified_base 6: mod_base = OTHER; note = 2'-O-methoxyethyl modified thymine
  modified_base 7: mod_base = OTHER; note = 2'-O-methoxyethyl modified thymine
  modified_base 8: mod_base = OTHER; note = 2'-O-methoxyethyl modified 5-methyl cytosine
  modified_base 9: mod_base = OTHER; note = 2'-O-methoxyethyl modified nucleotide
  modified_base 10: mod_base = OTHER; note = 2'-O-methoxyethyl modified thymine
  modified_base 11: mod_base = OTHER; note = 2'-O-methoxyethyl modified nucleotide
  modified_base 12: mod_base = OTHER; note = 2'-O-methoxyethyl modified nucleotide
  modified_base 13: mod_base = OTHER; note = 2'-O-methoxyethyl modified thymine
  modified_base 14: mod_base = OTHER; note = 2'-O-methoxyethyl modified nucleotide
  modified_base 15: mod_base = OTHER; note = 2'-O-methoxyethyl modified 5-methyl cytosine
  modified_base 16: mod_base = OTHER; note = 2'-O-methoxyethyl modified thymine with phosphorothioate linkage
  modified_base 17: mod_base = OTHER; note = 2'-O-methoxyethyl modified nucleotide with phosphorothioate linkage
  modified_base 18: mod_base = OTHER; note = 2'-O-methoxyethyl modified nucleotide
tcactttcataatgctgg

SEQ ID NO: 335 - RNA, 18 nt, synthetic construct
  source 1..18: mol_type = other RNA
  modified_base 1: mod_base = OTHER; note = 2'-O-N-methyl acetamide modified thymine with phosphorothioate linkage
  modified_base 2: mod_base = OTHER; note = 2'-O-N-methyl acetamide modified 5-methyl cytosine with phosphorothioate linkage
  modified_base 3: mod_base = OTHER; note = 2'-O-N-methyl acetamide modified nucleotide with phosphorothioate linkage
  modified_base 4: mod_base = OTHER; note = 2'-O-N-methyl acetamide modified 5-methyl cytosine with phosphorothioate linkage
  modified_base 5: mod_base = OTHER; note = 2'-O-N-methyl acetamide modified thymine with phosphorothioate linkage
  modified_base 6: mod_base = OTHER; note = 2'-O-N-methyl acetamide modified thymine with phosphorothioate linkage
  modified_base 7: mod_base = OTHER; note = 2'-O-N-methyl acetamide modified thymine with phosphorothioate linkage
  modified_base 8: mod_base = OTHER; note = 2'-O-N-methyl acetamide modified 5-methyl cytosine with phosphorothioate linkage
  modified_base 9: mod_base = OTHER; note = 2'-O-N-methyl acetamide modified nucleotide with phosphorothioate linkage
  modified_base 10: mod_base = OTHER; note = 2'-O-N-methyl acetamide modified thymine with phosphorothioate linkage
  modified_base 11: mod_base = OTHER; note = 2'-O-N-methyl acetamide modified nucleotide with phosphorothioate linkage
  modified_base 12: mod_base = OTHER; note = 2'-O-N-methyl acetamide modified nucleotide with phosphorothioate linkage
  modified_base 13: mod_base = OTHER; note = 2'-O-N-methyl acetamide modified thymine with phosphorothioate linkage
  modified_base 14: mod_base = OTHER; note = 2'-O-N-methyl acetamide modified nucleotide with phosphorothioate linkage
  modified_base 15: mod_base = OTHER; note = 2'-O-N-methyl acetamide modified 5-methyl cytosine with phosphorothioate linkage
  modified_base 16: mod_base = OTHER; note = 2'-O-methoxyethyl modified thymine with methoxypropyl phosphonate linkage
  modified_base 17: mod_base = OTHER; note = 2'-O-N-methyl acetamide modified nucleotide with phosphorothioate linkage
  modified_base 18: mod_base = OTHER; note = 2'-O-N-methyl acetamide modified nucleotide
tcactttcataatgctgg

SEQ ID NO: 336 - RNA, 18 nt, synthetic construct
  source 1..18: mol_type = other RNA
  modified_base 1: mod_base = OTHER; note = 2'-O-N-methyl acetamide modified thymine with phosphorothioate linkage
  modified_base 2: mod_base = OTHER; note = 2'-O-N-methyl acetamide modified 5-methyl cytosine with phosphorothioate linkage
  modified_base 3: mod_base = OTHER; note = 2'-O-N-methyl acetamide modified nucleotide with phosphorothioate linkage
  modified_base 4: mod_base = OTHER; note = 2'-O-N-methyl acetamide modified 5-methyl cytosine with phosphorothioate linkage
  modified_base 5: mod_base = OTHER; note = 2'-O-N-methyl acetamide modified thymine with phosphorothioate linkage
  modified_base 6: mod_base = OTHER; note = 2'-O-N-methyl acetamide modified thymine with phosphorothioate linkage
  modified_base 7: mod_base = OTHER; note = 2'-O-N-methyl acetamide modified thymine with phosphorothioate linkage
  modified_base 8: mod_base = OTHER; note = 2'-O-N-methyl acetamide modified 5-methyl cytosine with phosphorothioate linkage
  modified_base 9: mod_base = OTHER; note = 2'-O-N-methyl acetamide modified nucleotide with phosphorothioate linkage
  modified_base 10: mod_base = OTHER; note = 2'-O-N-methyl acetamide modified thymine with phosphorothioate linkage
  modified_base 11: mod_base = OTHER; note = 2'-O-N-methyl acetamide modified nucleotide with phosphorothioate linkage
  modified_base 12: mod_base = OTHER; note = 2'-O-N-methyl acetamide modified nucleotide with phosphorothioate linkage
  modified_base 13: mod_base = OTHER; note = 2'-O-N-methyl acetamide modified thymine with phosphorothioate linkage
  modified_base 14: mod_base = OTHER; note = 2'-O-N-methyl acetamide modified nucleotide with phosphorothioate linkage
  modified_base 15: mod_base = OTHER; note = 2'-O-N-methyl acetamide modified 5-methyl cytosine with phosphorothioate linkage
  modified_base 16: mod_base = OTHER; note = 2'-O-N-methyl acetamide modified thymine with phosphorothioate linkage
  modified_base 17: mod_base = OTHER; note = 2'-O-methoxyethyl modified nucleotide with methoxypropyl phosphonate linkage
  modified_base 18: mod_base = OTHER; note = 2'-O-N-methyl acetamide modified nucleotide
tcactttcataatgctgg

SEQ ID NO: 337 - RNA, 18 nt, synthetic construct
  source 1..18: mol_type = other RNA
  modified_base 1: mod_base = OTHER; note = 2'-O-N-methyl acetamide modified 5-methyl cytosine with phosphorothioate linkage
  modified_base 2: mod_base = OTHER; note = 2'-O-N-methyl acetamide modified nucleotide with phosphorothioate linkage
  modified_base 3: mod_base = OTHER; note = 2'-O-N-methyl acetamide modified 5-methyl cytosine with phosphorothioate linkage
  modified_base 4: mod_base = OTHER; note = 2'-O-N-methyl acetamide modified thymine with phosphorothioate linkage
  modified_base 5: mod_base = OTHER; note = 2'-O-N-methyl acetamide modified thymine with phosphorothioate linkage
  modified_base 6: mod_base = OTHER; note = 2'-O-N-methyl acetamide modified thymine with phosphorothioate linkage
  modified_base 7: mod_base = OTHER; note = 2'-O-N-methyl acetamide modified 5-methyl cytosine with phosphorothioate linkage
  modified_base 8: mod_base = OTHER; note = 2'-O-N-methyl acetamide modified nucleotide with phosphorothioate linkage
  modified_base 9: mod_base = OTHER; note = 2'-O-N-methyl acetamide modified thymine with phosphorothioate linkage
  modified_base 10: mod_base = OTHER; note = 2'-O-N-methyl acetamide modified nucleotide with phosphorothioate linkage
  modified_base 11: mod_base = OTHER; note = 2'-O-N-methyl acetamide modified nucleotide with phosphorothioate linkage
  modified_base 12: mod_base = OTHER; note = 2'-O-N-methyl acetamide modified thymine with phosphorothioate linkage
  modified_base 13: mod_base = OTHER; note = 2'-O-N-methyl acetamide modified nucleotide with phosphorothioate linkage
  modified_base 14: mod_base = OTHER; note = 2'-O-N-methyl acetamide modified 5-methyl cytosine with phosphorothioate linkage
  modified_base 15: mod_base = OTHER; note = 2'-O-N-methyl acetamide modified thymine with phosphorothioate linkage
  modified_base 16: mod_base = OTHER; note = 2'-O-N-methyl acetamide modified nucleotide with phosphorothioate linkage
  modified_base 17: mod_base = OTHER; note = 2'-O-methoxyethyl modified nucleotide with methoxypropyl phosphonate linkage
  modified_base 18: mod_base = OTHER; note = 2'-O-N-methyl acetamide modified 5-methyl cytosine
cactttcataatgctggc

SEQ ID NO: 338 - RNA, 18 nt, synthetic construct
  source 1..18: mol_type = other RNA
  modified_base 1: mod_base = OTHER; note = 2'-O-methoxyethyl modified thymine with mesyl phosphoramidate linkage
  modified_base 2: mod_base = OTHER; note = 2'-O-methoxyethyl modified 5-methyl cytosine with mesyl phosphoramidate linkage
  modified_base 3: mod_base = OTHER; note = 2'-O-methoxyethyl modified nucleotide with mesyl phosphoramidate linkage
  modified_base 4: mod_base = OTHER; note = 2'-O-methoxyethyl modified 5-methyl cytosine with mesyl phosphoramidate linkage
  modified_base 5: mod_base = OTHER; note = 2'-O-methoxyethyl modified thymine with mesyl phosphoramidate linkage
  modified_base 6: mod_base = OTHER; note = 2'-O-methoxyethyl modified thymine with mesyl phosphoramidate linkage
  modified_base 7: mod_base = OTHER; note = 2'-O-methoxyethyl modified thymine with mesyl phosphoramidate linkage
  modified_base 8: mod_base = OTHER; note = 2'-O-methoxyethyl modified 5-methyl cytosine with mesyl phosphoramidate linkage
  modified_base 9: mod_base = OTHER; note = 2'-O-methoxyethyl modified nucleotide with mesyl phosphoramidate linkage
  modified_base 10: mod_base = OTHER; note = 2'-O-methoxyethyl modified thymine with mesyl phosphoramidate linkage
  modified_base 11: mod_base = OTHER; note = 2'-O-methoxyethyl modified nucleotide with mesyl phosphoramidate linkage
  modified_base 12: mod_base = OTHER; note = 2'-O-methoxyethyl modified nucleotide with mesyl phosphoramidate linkage
  modified_base 13: mod_base = OTHER; note = 2'-O-methoxyethyl modified thymine with mesyl phosphoramidate linkage
  modified_base 14: mod_base = OTHER; note = 2'-O-methoxyethyl modified nucleotide with mesyl phosphoramidate linkage
  modified_base 15: mod_base = OTHER; note = 2'-O-methoxyethyl modified 5-methyl cytosine with mesyl phosphoramidate linkage
  modified_base 16: mod_base = OTHER; note = 2'-O-methoxyethyl modified thymine with mesyl phosphoramidate linkage
  modified_base 17: mod_base = OTHER; note = 2'-O-methoxyethyl modified nucleotide with mesyl phosphoramidate linkage
  modified_base 18: mod_base = OTHER; note = 2'-O-methoxyethyl modified nucleotide
tcactttcataatgctgg

SEQ ID NO: 339 - RNA, 18 nt, synthetic construct
  source 1..18: mol_type = other RNA
  modified_base 1: mod_base = OTHER; note = 2'-O-methoxyethyl modified thymine with phosphorothioate linkage
  modified_base 2: mod_base = OTHER; note = 2'-O-methoxyethyl modified 5-methyl cytosine with phosphorothioate linkage
  modified_base 3: mod_base = OTHER; note = 2'-O-methoxyethyl modified nucleotide with phosphorothioate linkage
  modified_base 4: mod_base = OTHER; note = 2'-O-methoxyethyl modified 5-methyl cytosine with phosphorothioate linkage
  modified_base 5: mod_base = OTHER; note = 2'-O-methoxyethyl modified thymine with phosphorothioate linkage
  modified_base 6: mod_base = OTHER; note = 2'-O-methoxyethyl modified thymine with phosphorothioate linkage
  modified_base 7: mod_base = OTHER; note = 2'-O-methoxyethyl modified thymine with phosphorothioate linkage
  modified_base 8: mod_base = OTHER; note = 2'-O-methoxyethyl modified 5-methyl cytosine with phosphorothioate linkage
  modified_base 9: mod_base = OTHER; note = 2'-O-methoxyethyl modified nucleotide with phosphorothioate linkage
  modified_base 10: mod_base = OTHER; note = 2'-O-methoxyethyl modified thymine with phosphorothioate linkage
  modified_base 11: mod_base = OTHER; note = 2'-O-methoxyethyl modified nucleotide with phosphorothioate linkage
  modified_base 12: mod_base = OTHER; note = 2'-O-methoxyethyl modified nucleotide with mesyl phosphoramidate linkage
  modified_base 13: mod_base = OTHER; note = 2'-O-methoxyethyl modified thymine with mesyl phosphoramidate linkage
  modified_base 14: mod_base = OTHER; note = 2'-O-methoxyethyl modified nucleotide with mesyl phosphoramidate linkage
  modified_base 15: mod_base = OTHER; note = 2'-O-methoxyethyl modified 5-methyl cytosine with mesyl phosphoramidate linkage
  modified_base 16: mod_base = OTHER; note = 2'-O-methoxyethyl modified thymine with mesyl phosphoramidate linkage
  modified_base 17: mod_base = OTHER; note = 2'-O-methoxyethyl modified nucleotide with mesyl phosphoramidate linkage
  modified_base 18: mod_base = OTHER; note = 2'-O-methoxyethyl modified nucleotide
tcactttcataatgctgg

SEQ ID NO: 340 - RNA, 18 nt, synthetic construct
  source 1..18: mol_type = other RNA
  modified_base 1: mod_base = OTHER; note = 2'-O-methoxyethyl modified thymine with phosphorothioate linkage
  modified_base 2: mod_base = OTHER; note = 2'-O-methoxyethyl modified 5-methyl cytosine with phosphorothioate linkage
  modified_base 3: mod_base = OTHER; note = 2'-O-methoxyethyl modified nucleotide with phosphorothioate linkage
  modified_base 4: mod_base = OTHER; note = 2'-O-methoxyethyl modified 5-methyl cytosine with phosphorothioate linkage
  modified_base 5: mod_base = OTHER; note = 2'-O-methoxyethyl modified thymine with phosphorothioate linkage
  modified_base 6: mod_base = OTHER; note = 2'-O-methoxyethyl modified thymine with mesyl phosphoramidate linkage
  modified_base 7: mod_base = OTHER; note = 2'-O-methoxyethyl modified thymine with mesyl phosphoramidate linkage
  modified_base 8: mod_base = OTHER; note = 2'-O-methoxyethyl modified 5-methyl cytosine with mesyl phosphoramidate linkage
  modified_base 9: mod_base = OTHER; note = 2'-O-methoxyethyl modified nucleotide with mesyl phosphoramidate linkage
  modified_base 10: mod_base = OTHER; note = 2'-O-methoxyethyl modified thymine with mesyl phosphoramidate linkage
  modified_base 11: mod_base = OTHER; note = 2'-O-methoxyethyl modified nucleotide with mesyl phosphoramidate linkage
  modified_base 12: mod_base = OTHER; note = 2'-O-methoxyethyl modified nucleotide with phosphorothioate linkage
  modified_base 13: mod_base = OTHER; note = 2'-O-methoxyethyl modified thymine with phosphorothioate linkage
  modified_base 14: mod_base = OTHER; note = 2'-O-methoxyethyl modified nucleotide with phosphorothioate linkage
  modified_base 15: mod_base = OTHER; note = 2'-O-methoxyethyl modified 5-methyl cytosine with phosphorothioate linkage
  modified_base 16: mod_base = OTHER; note = 2'-O-methoxyethyl modified thymine with phosphorothioate linkage
  modified_base 17: mod_base = OTHER; note = 2'-O-methoxyethyl modified nucleotide with phosphorothioate linkage
  modified_base 18: mod_base = OTHER; note = 2'-O-methoxyethyl modified nucleotide
tcactttcataatgctgg

SEQ ID NO: 341 - RNA, 18 nt, synthetic construct
  source 1..18: mol_type = other RNA
  modified_base 1: mod_base = OTHER; note = 2'-O-N-methyl acetamide modified thymine with phosphorothioate linkage
  modified_base 2: mod_base = OTHER; note = 2'-O-N-methyl acetamide modified 5-methyl cytosine with phosphorothioate linkage
  modified_base 3: mod_base = OTHER; note = 2'-O-N-methyl acetamide modified nucleotide
  modified_base 4: mod_base = OTHER; note = 2'-O-N-methyl acetamide modified 5-methyl cytosine
  modified_base 5: mod_base = OTHER; note = 2'-O-N-methyl acetamide modified thymine
  modified_base 6: mod_base = OTHER; note = 2'-O-N-methyl acetamide modified thymine
  modified_base 7: mod_base = OTHER; note = 2'-O-N-methyl acetamide modified thymine
  modified_base 8: mod_base = OTHER; note = 2'-O-N-methyl acetamide modified 5-methyl cytosine
  modified_base 9: mod_base = OTHER; note = 2'-O-N-methyl acetamide modified nucleotide
  modified_base 10: mod_base = OTHER; note = 2'-O-N-methyl acetamide modified thymine
  modified_base 11: mod_base = OTHER; note = 2'-O-N-methyl acetamide modified nucleotide
  modified_base 12: mod_base = OTHER; note = 2'-O-N-methyl acetamide modified nucleotide
  modified_base 13: mod_base = OTHER; note = 2'-O-N-methyl acetamide modified thymine
  modified_base 14: mod_base = OTHER; note = 2'-O-N-methyl acetamide modified nucleotide
  modified_base 15: mod_base = OTHER; note = 2'-O-N-methyl acetamide modified 5-methyl cytosine
  modified_base 16: mod_base = OTHER; note = 2'-O-N-methyl acetamide modified thymine with phosphorothioate linkage
  modified_base 17: mod_base = OTHER; note = 2'-O-N-methyl acetamide modified nucleotide with phosphorothioate linkage
  modified_base 18: mod_base = OTHER; note = 2'-O-N-methyl acetamide modified nucleotide
tcactttcataatgctgg

SEQ ID NO: 342 - RNA, 18 nt, synthetic construct
  source 1..18: mol_type = other RNA
  modified_base 1: mod_base = OTHER; note = 2'-O-methoxyethyl modified thymine with mesyl phosphoramidate linkage
  modified_base 2: mod_base = OTHER; note = 2'-O-methoxyethyl modified 5-methyl cytosine with mesyl phosphoramidate linkage
  modified_base 3: mod_base = OTHER; note = 2'-O-methoxyethyl modified nucleotide
  modified_base 4: mod_base = OTHER; note = 2'-O-methoxyethyl modified 5-methyl cytosine
  modified_base 5: mod_base = OTHER; note = 2'-O-methoxyethyl modified thymine
  modified_base 6: mod_base = OTHER; note = 2'-O-methoxyethyl modified thymine
  modified_base 7: mod_base = OTHER; note = 2'-O-methoxyethyl modified thymine
  modified_base 8: mod_base = OTHER; note = 2'-O-methoxyethyl modified 5-methyl cytosine
  modified_base 9: mod_base = OTHER; note = 2'-O-methoxyethyl modified nucleotide
  modified_base 10: mod_base = OTHER; note = 2'-O-methoxyethyl modified thymine
  modified_base 11: mod_base = OTHER; note = 2'-O-methoxyethyl modified nucleotide
  modified_base 12: mod_base = OTHER; note = 2'-O-methoxyethyl modified nucleotide
  modified_base 13: mod_base = OTHER; note = 2'-O-methoxyethyl modified thymine
  modified_base 14: mod_base = OTHER; note = 2'-O-methoxyethyl modified nucleotide
  modified_base 15: mod_base = OTHER; note = 2'-O-methoxyethyl modified 5-methyl cytosine
  modified_base 16: mod_base = OTHER; note = 2'-O-methoxyethyl modified thymine with mesyl phosphoramidate linkage
  modified_base 17: mod_base = OTHER; note = 2'-O-methoxyethyl modified nucleotide with mesyl phosphoramidate linkage
  modified_base 18: mod_base = OTHER; note = 2'-O-methoxyethyl modified nucleotide
tcactttcataatgctgg

SEQ ID NO: 343 - RNA, 18 nt, synthetic construct
  source 1..18: mol_type = other RNA
  modified_base 1: mod_base = OTHER; note = 2'-O-methoxyethyl modified thymine with mesyl phosphoramidate linkage
  modified_base 2: mod_base = OTHER; note = 2'-O-methoxyethyl modified 5-methyl cytosine with mesyl phosphoramidate linkage
  modified_base 3: mod_base = OTHER; note = 2'-O-methoxyethyl modified nucleotide with mesyl phosphoramidate linkage
  modified_base 4: mod_base = OTHER; note = 2'-O-methoxyethyl modified 5-methyl cytosine with mesyl phosphoramidate linkage
  modified_base 5: mod_base = OTHER; note = 2'-O-methoxyethyl modified thymine
  modified_base 6: mod_base = OTHER; note = 2'-O-methoxyethyl modified thymine
  modified_base 7: mod_base = OTHER; note = 2'-O-methoxyethyl modified thymine
  modified_base 8: mod_base = OTHER; note = 2'-O-methoxyethyl modified 5-methyl cytosine
  modified_base 9: mod_base = OTHER; note = 2'-O-methoxyethyl modified nucleotide
  modified_base 10: mod_base = OTHER; note = 2'-O-methoxyethyl modified thymine
  modified_base 11: mod_base = OTHER; note = 2'-O-methoxyethyl modified nucleotide
  modified_base 12: mod_base = OTHER; note = 2'-O-methoxyethyl modified nucleotide
  modified_base 13: mod_base = OTHER; note = 2'-O-methoxyethyl modified thymine
  modified_base 14: mod_base = OTHER; note = 2'-O-methoxyethyl modified nucleotide
  modified_base 15: mod_base = OTHER; note = 2'-O-methoxyethyl modified 5-methyl cytosine
  modified_base 16: mod_base = OTHER; note = 2'-O-methoxyethyl modified thymine with mesyl phosphoramidate linkage
  modified_base 17: mod_base = OTHER; note = 2'-O-methoxyethyl modified nucleotide with mesyl phosphoramidate linkage
  modified_base 18: mod_base = OTHER; note = 2'-O-methoxyethyl modified nucleotide
tcactttcataatgctgg

SEQ ID NO: 344 - RNA, 18 nt, synthetic construct
  source 1..18: mol_type = other RNA
  modified_base 1: mod_base = OTHER; note = 2'-O-methoxyethyl modified thymine with mesyl phosphoramidate linkage
  modified_base 2: mod_base = OTHER; note = 2'-O-methoxyethyl modified 5-methyl cytosine with mesyl phosphoramidate linkage
  modified_base 3: mod_base = OTHER; note = 2'-O-methoxyethyl modified nucleotide with mesyl phosphoramidate linkage
  modified_base 4: mod_base = OTHER; note = 2'-O-methoxyethyl modified 5-methyl cytosine with mesyl phosphoramidate linkage
  modified_base 5: mod_base = OTHER; note = 2'-O-methoxyethyl modified thymine with mesyl phosphoramidate linkage
  modified_base 6: mod_base = OTHER; note = 2'-O-methoxyethyl modified thymine with mesyl phosphoramidate linkage
  modified_base 7: mod_base = OTHER; note = 2'-O-methoxyethyl modified thymine
  modified_base 8: mod_base = OTHER; note = 2'-O-methoxyethyl modified 5-methyl cytosine
  modified_base 9: mod_base = OTHER; note = 2'-O-methoxyethyl modified nucleotide
  modified_base 10: mod_base = OTHER; note = 2'-O-methoxyethyl modified thymine
  modified_base 11: mod_base = OTHER; note = 2'-O-methoxyethyl modified nucleotide
  modified_base 12: mod_base = OTHER; note = 2'-O-methoxyethyl modified nucleotide
  modified_base 13: mod_base = OTHER; note = 2'-O-methoxyethyl modified thymine
  modified_base 14: mod_base = OTHER; note = 2'-O-methoxyethyl modified nucleotide
  modified_base 15: mod_base = OTHER; note = 2'-O-methoxyethyl modified 5-methyl cytosine
  modified_base 16: mod_base = OTHER; note = 2'-O-methoxyethyl modified thymine with mesyl phosphoramidate linkage
  modified_base 17: mod_base = OTHER; note = 2'-O-methoxyethyl modified nucleotide with mesyl phosphoramidate linkage
  modified_base 18: mod_base = OTHER; note = 2'-O-methoxyethyl modified nucleotide
tcactttcataatgctgg

SEQ ID NO: 345 - RNA, 18 nt, synthetic construct
  source 1..18: mol_type = other RNA
  modified_base 1: mod_base = OTHER; note = 2'-O-methoxyethyl modified thymine with mesyl phosphoramidate linkage
  modified_base 2: mod_base = OTHER; note = 2'-O-methoxyethyl modified 5-methyl cytosine with mesyl phosphoramidate linkage
  modified_base 3: mod_base = OTHER; note = 2'-O-methoxyethyl modified nucleotide with mesyl phosphoramidate linkage
  modified_base 4: mod_base = OTHER; note = 2'-O-methoxyethyl modified 5-methyl cytosine with mesyl phosphoramidate linkage
  modified_base 5: mod_base = OTHER; note = 2'-O-methoxyethyl modified thymine with mesyl phosphoramidate linkage
  modified_base 6: mod_base = OTHER; note = 2'-O-methoxyethyl modified thymine with mesyl phosphoramidate linkage
  modified_base 7: mod_base = OTHER; note = 2'-O-methoxyethyl modified thymine with mesyl phosphoramidate linkage
  modified_base 8: mod_base = OTHER; note = 2'-O-methoxyethyl modified 5-methyl cytosine with mesyl phosphoramidate linkage
  modified_base 9: mod_base = OTHER; note = 2'-O-methoxyethyl modified nucleotide
  modified_base 10: mod_base = OTHER; note = 2'-O-methoxyethyl modified thymine
  modified_base 11: mod_base = OTHER; note = 2'-O-methoxyethyl modified nucleotide
  modified_base 12: mod_base = OTHER; note = 2'-O-methoxyethyl modified nucleotide
  modified_base 13: mod_base = OTHER; note = 2'-O-methoxyethyl modified thymine
  modified_base 14: mod_base = OTHER; note = 2'-O-methoxyethyl modified nucleotide
  modified_base 15: mod_base = OTHER; note = 2'-O-methoxyethyl modified 5-methyl cytosine
  modified_base 16: mod_base = OTHER; note = 2'-O-methoxyethyl modified thymine with mesyl phosphoramidate linkage
  modified_base 17: mod_base = OTHER; note = 2'-O-methoxyethyl modified nucleotide with mesyl phosphoramidate linkage
  modified_base 18: mod_base = OTHER; note = 2'-O-methoxyethyl modified nucleotide
tcactttcataatgctgg

SEQ ID NO: 346 - RNA, 18 nt, synthetic construct
  source 1..18: mol_type = other RNA
  modified_base 1: mod_base = OTHER; note = 2'-O-(N,N-dimethyl) acetamide modified thymine with phosphorothioate linkage
  modified_base 2: mod_base = OTHER; note = 2'-O-(N,N-dimethyl) acetamide modified 5-methyl cytosine with phosphorothioate linkage
  modified_base 3: mod_base = OTHER; note = 2'-O-N-methyl acetamide modified nucleotide with phosphorothioate linkage
  modified_base 4: mod_base = OTHER; note = 2'-O-(N,N-dimethyl) acetamide modified 5-methyl cytosine with phosphorothioate linkage
  modified_base 5: mod_base = OTHER; note = 2'-O-(N,N-dimethyl) acetamide modified thymine with phosphorothioate linkage
  modified_base 6: mod_base = OTHER; note = 2'-O-(N,N-dimethyl) acetamide modified thymine with phosphorothioate linkage
  modified_base 7: mod_base = OTHER; note = 2'-O-(N,N-dimethyl) acetamide modified thymine with phosphorothioate linkage
  modified_base 8: mod_base = OTHER; note = 2'-O-(N,N-dimethyl) acetamide modified 5-methyl cytosine with phosphorothioate linkage
  modified_base 9: mod_base = OTHER; note = 2'-O-N-methyl acetamide modified nucleotide with phosphorothioate linkage
  modified_base 10: mod_base = OTHER; note = 2'-O-(N,N-dimethyl) acetamide modified thymine with phosphorothioate linkage
  modified_base 11: mod_base = OTHER; note = 2'-O-N-methyl acetamide modified nucleotide with phosphorothioate linkage
  modified_base 12: mod_base = OTHER; note = 2'-O-N-methyl acetamide modified nucleotide with phosphorothioate linkage
  modified_base 13: mod_base = OTHER; note = 2'-O-(N,N-dimethyl) acetamide modified thymine with phosphorothioate linkage
  modified_base 14: mod_base = OTHER; note = 2'-O-N-methyl acetamide modified nucleotide with phosphorothioate linkage
  modified_base 15: mod_base = OTHER; note = 2'-O-(N,N-dimethyl) acetamide modified 5-methyl cytosine with phosphorothioate linkage
  modified_base 16: mod_base = OTHER; note = 2'-O-(N,N-dimethyl) acetamide modified thymine with phosphorothioate linkage
  modified_base 17: mod_base = OTHER; note = 2'-O-N-methyl acetamide modified nucleotide with phosphorothioate linkage
  modified_base 18: mod_base = OTHER; note = 2'-O-N-methyl acetamide modified nucleotide
tcactttcataatgctgg

SEQ ID NO: 347 - RNA, 18 nt, synthetic construct
  source 1..18: mol_type = other RNA
  modified_base 1: mod_base = OTHER; note = 2'-O-(N-ethyl) acetamide modified thymine with phosphorothioate linkage
  modified_base 2: mod_base = OTHER; note = 2'-O-(N-ethyl) acetamide modified 5-methyl cytosine with phosphorothioate linkage
  modified_base 3: mod_base = OTHER; note = 2'-O-N-methyl acetamide modified nucleotide with phosphorothioate linkage
  modified_base 4: mod_base = OTHER; note = 2'-O-(N-ethyl) acetamide modified 5-methyl cytosine with phosphorothioate linkage
  modified_base 5: mod_base = OTHER; note = 2'-O-(N-ethyl) acetamide modified thymine with phosphorothioate linkage
  modified_base 6: mod_base = OTHER; note = 2'-O-(N-ethyl) acetamide modified thymine with phosphorothioate linkage
  modified_base 7: mod_base = OTHER; note = 2'-O-(N-ethyl) acetamide modified thymine with phosphorothioate linkage
  modified_base 8: mod_base = OTHER; note = 2'-O-(N-ethyl) acetamide modified 5-methyl cytosine with phosphorothioate linkage
  modified_base 9: mod_base = OTHER; note = 2'-O-N-methyl acetamide modified nucleotide with phosphorothioate linkage
  modified_base 10: mod_base = OTHER; note = 2'-O-(N-ethyl) acetamide modified thymine with phosphorothioate linkage
  modified_base 11: mod_base = OTHER; note = 2'-O-N-methyl acetamide modified nucleotide with phosphorothioate linkage
  modified_base 12: mod_base = OTHER; note = 2'-O-N-methyl acetamide modified nucleotide with phosphorothioate linkage
  modified_base 13: mod_base = OTHER; note = 2'-O-(N-ethyl) acetamide modified thymine with phosphorothioate linkage
  modified_base 14: mod_base = OTHER; note = 2'-O-N-methyl acetamide modified nucleotide with phosphorothioate linkage
  modified_base 15: mod_base = OTHER; note = 2'-O-(N-ethyl) acetamide modified 5-methyl cytosine with phosphorothioate linkage
  modified_base 16: mod_base = OTHER; note = 2'-O-(N-ethyl) acetamide modified thymine with phosphorothioate linkage
  modified_base 17: mod_base = OTHER; note = 2'-O-N-methyl acetamide modified nucleotide with phosphorothioate linkage
  modified_base 18: mod_base = OTHER; note = 2'-O-N-methyl acetamide modified nucleotide
tcactttcataatgctgg

SEQ ID NO: 348 - RNA, 18 nt, synthetic construct
  source 1..18: mol_type = other RNA
  modified_base 1: mod_base = OTHER; note = 2'-O-(N-propyl) acetamide modified thymine with phosphorothioate linkage
  modified_base 2: mod_base = OTHER; note = 2'-O-(N-propyl) acetamide modified 5-methyl cytosine with phosphorothioate linkage
  modified_base 3: mod_base = OTHER; note = 2'-O-N-methyl acetamide modified nucleotide with phosphorothioate linkage
  modified_base 4: mod_base = OTHER; note = 2'-O-(N-propyl) acetamide modified 5-methyl cytosine with phosphorothioate linkage
  modified_base 5: mod_base = OTHER; note = 2'-O-(N-propyl) acetamide modified thymine with phosphorothioate linkage
  modified_base 6: mod_base = OTHER; note = 2'-O-(N-propyl) acetamide modified thymine with phosphorothioate linkage
  modified_base 7: mod_base = OTHER; note = 2'-O-(N-propyl) acetamide modified thymine with phosphorothioate linkage
  modified_base 8: mod_base = OTHER; note = 2'-O-(N-propyl) acetamide modified 5-methyl cytosine with phosphorothioate linkage
  modified_base 9: mod_base = OTHER; note = 2'-O-N-methyl acetamide modified nucleotide with phosphorothioate linkage
  modified_base 10: mod_base = OTHER; note = 2'-O-(N-propyl) acetamide modified thymine with phosphorothioate linkage
  modified_base 11: mod_base = OTHER; note = 2'-O-N-methyl acetamide modified nucleotide with phosphorothioate linkage
  modified_base 12: mod_base = OTHER; note = 2'-O-N-methyl acetamide modified nucleotide with phosphorothioate linkage
  modified_base 13: mod_base = OTHER; note = 2'-O-(N-propyl) acetamide modified thymine with phosphorothioate linkage
  modified_base 14: mod_base = OTHER; note = 2'-O-N-methyl acetamide modified nucleotide with phosphorothioate linkage
  modified_base 15: mod_base = OTHER; note = 2'-O-(N-propyl) acetamide modified 5-methyl cytosine with phosphorothioate linkage
  modified_base 16: mod_base = OTHER; note = 2'-O-(N-propyl) acetamide modified thymine with phosphorothioate linkage
  modified_base 17: mod_base = OTHER; note = 2'-O-N-methyl acetamide modified nucleotide with phosphorothioate linkage
  modified_base 18: mod_base = OTHER; note = 2'-O-N-methyl acetamide modified nucleotide
tcactttcataatgctgg

SEQ ID NO: 349 - RNA, 18 nt, synthetic construct
  source 1..18: mol_type = other RNA
  modified_base 1: mod_base = OTHER; note = 2'-O-(N-cyclopropyl) acetamide modified thymine with phosphorothioate linkage
  modified_base 2: mod_base = OTHER; note = 2'-O-(N-cyclopropyl) acetamide modified 5-methyl cytosine with phosphorothioate linkage
  modified_base 3: mod_base = OTHER; note = 2'-O-N-methyl acetamide modified nucleotide with phosphorothioate linkage
  modified_base 4: mod_base = OTHER; note = 2'-O-(N-cyclopropyl) acetamide modified 5-methyl cytosine with phosphorothioate linkage
  modified_base 5: mod_base = OTHER; note = 2'-O-(N-cyclopropyl) acetamide modified thymine with phosphorothioate linkage
  modified_base 6: mod_base = OTHER; note = 2'-O-(N-cyclopropyl) acetamide modified thymine with phosphorothioate linkage
  modified_base 7: mod_base = OTHER; note = 2'-O-(N-cyclopropyl) acetamide modified thymine with phosphorothioate linkage
  modified_base 8: mod_base = OTHER; note = 2'-O-(N-cyclopropyl) acetamide modified 5-methyl cytosine with phosphorothioate linkage
  modified_base 9: mod_base = OTHER; note = 2'-O-N-methyl acetamide modified nucleotide with phosphorothioate linkage
  modified_base 10: mod_base = OTHER; note = 2'-O-(N-cyclopropyl) acetamide modified thymine with phosphorothioate linkage
  modified_base 11: mod_base = OTHER; note = 2'-O-N-methyl acetamide modified nucleotide with phosphorothioate linkage
  modified_base 12: mod_base = OTHER; note = 2'-O-N-methyl acetamide modified nucleotide with phosphorothioate linkage
  modified_base 13: mod_base = OTHER; note = 2'-O-(N-cyclopropyl) acetamide modified thymine with phosphorothioate linkage
  modified_base 14: mod_base = OTHER; note = 2'-O-N-methyl acetamide modified nucleotide with phosphorothioate linkage
  modified_base 15: mod_base = OTHER; note = 2'-O-(N-cyclopropyl) acetamide modified 5-methyl cytosine with phosphorothioate linkage
  modified_base 16: mod_base = OTHER; note = 2'-O-(N-cyclopropyl) acetamide modified thymine with phosphorothioate linkage
  modified_base 17: mod_base = OTHER; note = 2'-O-N-methyl acetamide modified nucleotide with phosphorothioate linkage
  modified_base 18: mod_base = OTHER; note = 2'-O-N-methyl acetamide modified nucleotide
tcactttcataatgctgg

SEQ ID NO: 350 - RNA, 18 nt, synthetic construct
  source 1..18: mol_type = other RNA
  modified_base 1: mod_base = OTHER; note = 2'-O-(N-cyclopropylmethyl) acetamide modified thymine with phosphorothioate linkage
  modified_base 2: mod_base = OTHER; note = 2'-O-(N-cyclopropylmethyl) acetamide modified 5-methyl cytosine with phosphorothioate linkage
  modified_base 3: mod_base = OTHER; note = 2'-O-N-methyl acetamide modified nucleotide with phosphorothioate linkage
  modified_base 4: mod_base = OTHER; note = 2'-O-(N-cyclopropylmethyl) acetamide modified 5-methyl cytosine with phosphorothioate linkage
  modified_base 5: mod_base = OTHER; note = 2'-O-(N-cyclopropylmethyl) acetamide modified thymine with phosphorothioate linkage
  modified_base 6: mod_base = OTHER; note = 2'-O-(N-cyclopropylmethyl) acetamide modified thymine with phosphorothioate linkage
  modified_base 7: mod_base = OTHER; note = 2'-O-(N-cyclopropylmethyl) acetamide modified thymine with phosphorothioate linkage
  modified_base 8: mod_base = OTHER; note = 2'-O-(N-cyclopropylmethyl) acetamide modified 5-methyl cytosine with phosphorothioate linkage
  modified_base 9: mod_base = OTHER; note = 2'-O-N-methyl acetamide modified nucleotide with phosphorothioate linkage
  modified_base 10: mod_base = OTHER; note = 2'-O-(N-cyclopropylmethyl) acetamide modified thymine with phosphorothioate linkage
  modified_base 11: mod_base = OTHER; note = 2'-O-N-methyl acetamide modified nucleotide with phosphorothioate linkage
  modified_base 12: mod_base = OTHER; note = 2'-O-N-methyl acetamide modified nucleotide with phosphorothioate linkage
  modified_base 13: mod_base = OTHER; note = 2'-O-(N-cyclopropylmethyl) acetamide modified thymine with phosphorothioate linkage
  modified_base 14: mod_base = OTHER; note = 2'-O-N-methyl acetamide modified nucleotide with phosphorothioate linkage
  modified_base 15: mod_base = OTHER; note = 2'-O-(N-cyclopropylmethyl) acetamide modified 5-methyl cytosine with phosphorothioate linkage
  modified_base 16: mod_base = OTHER; note = 2'-O-(N-cyclopropylmethyl) acetamide modified thymine with phosphorothioate linkage
  modified_base 17: mod_base = OTHER; note = 2'-O-N-methyl acetamide modified nucleotide with phosphorothioate linkage
  modified_base 18: mod_base = OTHER; note = 2'-O-N-methyl acetamide modified nucleotide
tcactttcataatgctgg

SEQ ID NO: 351 - RNA, 18 nt, synthetic construct
  source 1..18: mol_type = other RNA
  modified_base 1: mod_base = OTHER; note = 2'-O-methoxyethyl modified 5-methyl cytosine with phosphorothioate linkage
  modified_base 2: mod_base = OTHER; note = 2'-O-methoxyethyl modified nucleotide
  modified_base 3: mod_base = OTHER; note = 2'-O-methoxyethyl modified 5-methyl cytosine with phosphorothioate linkage
  modified_base 4: mod_base = OTHER; note = 2'-O-methoxyethyl modified thymine
  modified_base 5: mod_base = OTHER; note = 2'-O-methoxyethyl modified thymine with phosphorothioate linkage
  modified_base 6: mod_base = OTHER; note = 2'-O-methoxyethyl modified thymine with phosphorothioate linkage
  modified_base 7: mod_base = OTHER; note = 2'-O-methoxyethyl modified 5-methyl cytosine with phosphorothioate linkage
  modified_base 8: mod_base = OTHER; note = 2'-O-methoxyethyl modified nucleotide with phosphorothioate linkage
  modified_base 9: mod_base = OTHER; note = 2'-O-methoxyethyl modified thymine with phosphorothioate linkage
  modified_base 10: mod_base = OTHER; note = 2'-O-methoxyethyl modified nucleotide with phosphorothioate linkage
  modified_base 11: mod_base = OTHER; note = 2'-O-methoxyethyl modified nucleotide with phosphorothioate linkage
  modified_base 12: mod_base = OTHER; note = 2'-O-methoxyethyl modified thymine with phosphorothioate linkage
  modified_base 13: mod_base = OTHER; note = 2'-O-methoxyethyl modified nucleotide with phosphorothioate linkage
  modified_base 14: mod_base = OTHER; note = 2'-O-methoxyethyl modified 5-methyl cytosine with phosphorothioate linkage
  modified_base 15: mod_base = OTHER; note = 2'-O-methoxyethyl modified thymine with phosphorothioate linkage
  modified_base 16: mod_base = OTHER; note = 2'-O-methoxyethyl modified nucleotide with phosphorothioate linkage
  modified_base 17: mod_base = OTHER; note = 2'-O-methoxyethyl modified nucleotide with phosphorothioate linkage
  modified_base 18: mod_base = OTHER; note = 2'-O-methoxyethyl modified 5-methyl cytosine
cactttcataatgctggc

SEQ ID NO: 352 - RNA, 20 nt, synthetic construct
  source 1..20: mol_type = other RNA
  modified_base 1: mod_base = OTHER; note = 2'-O-methoxyethyl modified thymine
  modified_base 2: mod_base = OTHER; note = 2'-O-methoxyethyl modified thymine with phosphorothioate linkage
  modified_base 3: mod_base = OTHER; note = 2'-O-methoxyethyl modified 5-methyl cytosine with phosphorothioate linkage
  modified_base 4: mod_base = OTHER; note = 2'-O-methoxyethyl modified nucleotide with phosphorothioate linkage
  modified_base 5: mod_base = OTHER; note = 2'-O-methoxyethyl modified 5-methyl cytosine with phosphorothioate linkage
  modified_base 6: mod_base = OTHER; note = 2'-O-methoxyethyl modified thymine with phosphorothioate linkage
  modified_base 7: mod_base = OTHER; note = 2'-O-methoxyethyl modified thymine with phosphorothioate linkage
  modified_base 8: mod_base = OTHER; note = 2'-O-methoxyethyl modified thymine with phosphorothioate linkage
  modified_base 9: mod_base = OTHER; note = 2'-O-methoxyethyl modified 5-methyl cytosine with phosphorothioate linkage
  modified_base 10: mod_base = OTHER; note = 2'-O-methoxyethyl modified nucleotide with phosphorothioate linkage
  modified_base 11: mod_base = OTHER; note = 2'-O-methoxyethyl modified thymine with phosphorothioate linkage
  modified_base 12: mod_base = OTHER; note = 2'-O-methoxyethyl modified nucleotide with phosphorothioate linkage
  modified_base 13: mod_base = OTHER; note = 2'-O-methoxyethyl modified nucleotide with phosphorothioate linkage
  modified_base 14: mod_base = OTHER; note = 2'-O-methoxyethyl modified thymine with phosphorothioate linkage
  modified_base 15: mod_base = OTHER; note = 2'-O-methoxyethyl modified nucleotide with phosphorothioate linkage
  modified_base 16: mod_base = OTHER; note = 2'-O-methoxyethyl modified 5-methyl cytosine with phosphorothioate linkage
  modified_base 17: mod_base = OTHER; note = 2'-O-methoxyethyl modified thymine with phosphorothioate linkage
  modified_base 18: mod_base = OTHER; note = 2'-O-methoxyethyl modified nucleotide with phosphorothioate linkage
  modified_base 19: mod_base = OTHER; note = 2'-O-methoxyethyl modified nucleotide
  modified_base 20: mod_base = OTHER; note = 2'-O-methoxyethyl modified 5-methyl cytosine
ttcactttcataatgctggc

SEQ ID NO: 353 - RNA, 20 nt, synthetic construct
  source 1..20: mol_type = other RNA
  modified_base 1: mod_base = OTHER; note = 2'-O-methoxyethyl modified thymine
  modified_base 2: mod_base = OTHER; note = 2'-O-N-methyl acetamide modified thymine with phosphorothioate linkage
  modified_base 3: mod_base = OTHER; note = 2'-O-N-methyl acetamide modified 5-methyl cytosine with phosphorothioate linkage
  modified_base 4: mod_base = OTHER; note = 2'-O-N-methyl acetamide modified nucleotide with phosphorothioate linkage
  modified_base 5: mod_base = OTHER; note = 2'-O-N-methyl acetamide modified 5-methyl cytosine with phosphorothioate linkage
  modified_base 6: mod_base = OTHER; note = 2'-O-N-methyl acetamide modified thymine with phosphorothioate linkage
  modified_base 7: mod_base = OTHER; note = 2'-O-N-methyl acetamide modified thymine with phosphorothioate linkage
  modified_base 8: mod_base = OTHER; note = 2'-O-N-methyl acetamide modified thymine with phosphorothioate linkage
  modified_base 9: mod_base = OTHER; note = 2'-O-N-methyl acetamide modified 5-methyl cytosine with phosphorothioate linkage
  modified_base 10: mod_base = OTHER; note = 2'-O-N-methyl acetamide modified nucleotide with phosphorothioate linkage
  modified_base 11: mod_base = OTHER; note = 2'-O-N-methyl acetamide modified thymine with phosphorothioate linkage
  modified_base 12: mod_base = OTHER; note = 2'-O-N-methyl acetamide modified nucleotide with phosphorothioate linkage
  modified_base 13: mod_base = OTHER; note = 2'-O-N-methyl acetamide modified nucleotide with phosphorothioate linkage
  modified_base 14: mod_base = OTHER; note = 2'-O-N-methyl acetamide modified thymine with phosphorothioate linkage
  modified_base 15: mod_base = OTHER; note = 2'-O-N-methyl acetamide modified nucleotide with phosphorothioate linkage
  modified_base 16: mod_base = OTHER; note = 2'-O-N-methyl acetamide modified 5-methyl cytosine with phosphorothioate linkage
  modified_base 17: mod_base = OTHER; note = 2'-O-N-methyl acetamide modified thymine with phosphorothioate linkage
  modified_base 18: mod_base = OTHER; note = 2'-O-N-methyl acetamide modified nucleotide with phosphorothioate linkage
  modified_base 19: mod_base = OTHER; note = 2'-O-N-methyl acetamide modified nucleotide
  modified_base 20: mod_base = OTHER; note = 2'-O-methoxyethyl modified 5-methyl cytosine
ttcactttcataatgctggc

SEQ ID NO: 354 - RNA, 18 nt, synthetic construct
  source 1..18: mol_type = other RNA
  modified_base 1: mod_base = OTHER; note = 2'-O-N-methyl acetamide modified 5-methyl cytosine with phosphorothioate linkage
  modified_base 2: mod_base = OTHER; note = 2'-O-N-methyl acetamide modified nucleotide
  modified_base 3: mod_base = OTHER; note = 2'-O-N-methyl acetamide modified 5-methyl cytosine with phosphorothioate linkage
  modified_base 4: mod_base = OTHER; note = 2'-O-N-methyl acetamide modified thymine
  modified_base 5: mod_base = OTHER; note = 2'-O-N-methyl acetamide modified thymine with phosphorothioate linkage
  modified_base 6: mod_base = OTHER; note = 2'-O-N-methyl acetamide modified thymine with phosphorothioate linkage
  modified_base 7: mod_base = OTHER; note = 2'-O-N-methyl acetamide modified 5-methyl cytosine with phosphorothioate linkage
  modified_base 8: mod_base = OTHER; note = 2'-O-N-methyl acetamide modified nucleotide with phosphorothioate linkage
  modified_base 9: mod_base = OTHER; note = 2'-O-N-methyl acetamide modified thymine with phosphorothioate linkage
  modified_base 10: mod_base = OTHER; note = 2'-O-N-methyl acetamide modified nucleotide with phosphorothioate linkage
  modified_base 11: mod_base = OTHER; note = 2'-O-N-methyl acetamide modified nucleotide with phosphorothioate linkage
  modified_base 12: mod_base = OTHER; note = 2'-O-N-methyl acetamide modified thymine with phosphorothioate linkage
  modified_base 13: mod_base = OTHER; note = 2'-O-N-methyl acetamide modified nucleotide with phosphorothioate linkage
  modified_base 14: mod_base = OTHER; note = 2'-O-N-methyl acetamide modified 5-methyl cytosine with phosphorothioate linkage
  modified_base 15: mod_base = OTHER; note = 2'-O-N-methyl acetamide modified thymine with phosphorothioate linkage
  modified_base 16: mod_base = OTHER; note = 2'-O-N-methyl acetamide modified nucleotide with phosphorothioate linkage
  modified_base 17: mod_base = OTHER; note = 2'-O-N-methyl acetamide modified nucleotide with phosphorothioate linkage
  modified_base 18: mod_base = OTHER; note = 2'-O-N-methyl acetamide modified 5-methyl cytosine
cactttcataatgctggc

SEQ ID NO: 355 - RNA, 18 nt, synthetic construct
  misc_feature 1..18: note = Synthetic oligonucleotide
  source 1..18: mol_type = other RNA
  modified_base 1: mod_base = OTHER; note = 2'-O-methoxyethyl modified thymine with phosphorothioate linkage
  modified_base 2: mod_base = OTHER; note = 2'-O-methoxyethyl modified 5-methyl cytosine with phosphorothioate linkage
  modified_base 3: mod_base = OTHER; note = 2'-O-methoxyethyl modified nucleotide with phosphorothioate linkage
  modified_base 4: mod_base = OTHER; note = 2'-O-methoxyethyl modified 5-methyl cytosine with phosphorothioate linkage
  modified_base 5: mod_base = OTHER; note = 2'-O-methoxyethyl modified thymine with phosphorothioate linkage
  modified_base 6: mod_base = OTHER; note = 2'-O-methoxyethyl modified thymine with phosphorothioate linkage
  modified_base 7: mod_base = OTHER; note = 2'-O-methoxyethyl modified thymine with phosphorothioate linkage
  modified_base 8: mod_base = OTHER; note = 2'-O-methoxyethyl modified 5-methyl cytosine with phosphorothioate linkage
  modified_base 9: mod_base = OTHER; note = 2'-O-methoxyethyl modified nucleotide with phosphorothioate linkage
  modified_base 10: mod_base = OTHER; note = 2'-O-methoxyethyl modified thymine with phosphorothioate linkage
  modified_base 11: mod_base = OTHER; note = 2'-O-methoxyethyl modified nucleotide with phosphorothioate linkage
  modified_base 12: mod_base = OTHER; note = 2'-O-methoxyethyl modified nucleotide with phosphorothioate linkage
  modified_base 13: mod_base = OTHER; note = 2'-O-methoxyethyl modified thymine with phosphorothioate linkage
  modified_base 14: mod_base = OTHER; note = 2'-O-methoxyethyl modified nucleotide with phosphorothioate linkage
  modified_base 15: mod_base = OTHER; note = 2'-O-methoxyethyl modified 5-methyl cytosine with phosphorothioate linkage
  modified_base 16: mod_base = OTHER; note = 2'-O-methoxyethyl modified thymine with phosphorothioate linkage
  modified_base 17: mod_base = OTHER; note = 2'-O-methoxyethyl modified nucleotide with phosphorothioate linkage
  modified_base 18: mod_base = OTHER; note = 2'-O-methoxyethyl modified nucleotide
tcactttcataatgctgg
